United States Patent Application Publication US 2026/0375176 A1, published November 26, 2026 (application 19/167,736).

The application's sequence listing, which the Patent Office published only in electronic form, follows.

SEQUENCE LISTING (4023 sequences)

SEQ ID NO: 1 - RNA, 19 nt, synthetic construct
  source 1..19: mol_type = other RNA
aaaaaggaggagcttcaac

SEQ ID NO: 2 - RNA, 19 nt, synthetic construct
  source 1..19: mol_type = other RNA
aaaaggaggagcttcaacc

SEQ ID NO: 3 - RNA, 19 nt, synthetic construct
  source 1..19: mol_type = other RNA
aaaggaggagcttcaacct

SEQ ID NO: 4 - RNA, 19 nt, synthetic construct
  source 1..19: mol_type = other RNA
aaggaggagcttcaacctg

SEQ ID NO: 5 - RNA, 19 nt, synthetic construct
  source 1..19: mol_type = other RNA
aggaggagcttcaacctgt

SEQ ID NO: 6 - RNA, 19 nt, synthetic construct
  source 1..19: mol_type = other RNA
ggaggagcttcaacctgtg

SEQ ID NO: 7 - RNA, 19 nt, synthetic construct
  source 1..19: mol_type = other RNA
gaggagcttcaacctgtgt

SEQ ID NO: 8 - RNA, 19 nt, synthetic construct
  source 1..19: mol_type = other RNA
aggagcttcaacctgtgtg

SEQ ID NO: 9 - RNA, 19 nt, synthetic construct
  source 1..19: mol_type = other RNA
ggagcttcaacctgtgtgc

SEQ ID NO: 10 - RNA, 19 nt, synthetic construct
  source 1..19: mol_type = other RNA
gagcttcaacctgtgtgca

SEQ ID NO: 11 - RNA, 19 nt, synthetic construct
  source 1..19: mol_type = other RNA
agcttcaacctgtgtgcaa

SEQ ID NO: 12 - RNA, 19 nt, synthetic construct
  source 1..19: mol_type = other RNA
gcttcaacctgtgtgcaaa

SEQ ID NO: 13 - RNA, 19 nt, synthetic construct
  source 1..19: mol_type = other RNA
cttcaacctgtgtgcaaaa

SEQ ID NO: 14 - RNA, 19 nt, synthetic construct
  source 1..19: mol_type = other RNA
ttcaacctgtgtgcaaaat

SEQ ID NO: 15 - RNA, 19 nt, synthetic construct
  source 1..19: mol_type = other RNA
tcaacctgtgtgcaaaatc

SEQ ID NO: 16 - RNA, 19 nt, synthetic construct
  source 1..19: mol_type = other RNA
caacctgtgtgcaaaatct

SEQ ID NO: 17 - RNA, 19 nt, synthetic construct
  source 1..19: mol_type = other RNA
aacctgtgtgcaaaatctg

SEQ ID NO: 18 - RNA, 19 nt, synthetic construct
  source 1..19: mol_type = other RNA
acctgtgtgcaaaatctgg

SEQ ID NO: 19 - RNA, 19 nt, synthetic construct
  source 1..19: mol_type = other RNA
cctgtgtgcaaaatctggg

SEQ ID NO: 20 - RNA, 19 nt, synthetic construct
  source 1..19: mol_type = other RNA
ctgtgtgcaaaatctggga

SEQ ID NO: 21 - RNA, 19 nt, synthetic construct
  source 1..19: mol_type = other RNA
tgtgtgcaaaatctgggaa

SEQ ID NO: 22 - RNA, 19 nt, synthetic construct
  source 1..19: mol_type = other RNA
gtgtgcaaaatctgggaac

SEQ ID NO: 23 - RNA, 19 nt, synthetic construct
  source 1..19: mol_type = other RNA
tgtgcaaaatctgggaacc

SEQ ID NO: 24 - RNA, 19 nt, synthetic construct
  source 1..19: mol_type = other RNA
gtgcaaaatctgggaacct

SEQ ID NO: 25 - RNA, 19 nt, synthetic construct
  source 1..19: mol_type = other RNA
tgcaaaatctgggaacctg

SEQ ID NO: 26 - RNA, 19 nt, synthetic construct
  source 1..19: mol_type = other RNA
gcaaaatctgggaacctga

SEQ ID NO: 27 - RNA, 19 nt, synthetic construct
  source 1..19: mol_type = other RNA
caaaatctgggaacctgac

SEQ ID NO: 28 - RNA, 19 nt, synthetic construct
  source 1..19: mol_type = other RNA
aaaatctgggaacctgaca

SEQ ID NO: 29 - RNA, 19 nt, synthetic construct
  source 1..19: mol_type = other RNA
aaatctgggaacctgacag

SEQ ID NO: 30 - RNA, 19 nt, synthetic construct
  source 1..19: mol_type = other RNA
aatctgggaacctgacagt

SEQ ID NO: 31 - RNA, 19 nt, synthetic construct
  source 1..19: mol_type = other RNA
atctgggaacctgacagta

SEQ ID NO: 32 - RNA, 19 nt, synthetic construct
  source 1..19: mol_type = other RNA
tctgggaacctgacagtat

SEQ ID NO: 33 - RNA, 19 nt, synthetic construct
  source 1..19: mol_type = other RNA
ctgggaacctgacagtata

SEQ ID NO: 34 - RNA, 19 nt, synthetic construct
  source 1..19: mol_type = other RNA
tgggaacctgacagtatag

SEQ ID NO: 35 - RNA, 19 nt, synthetic construct
  source 1..19: mol_type = other RNA
gggaacctgacagtatagg

SEQ ID NO: 36 - RNA, 19 nt, synthetic construct
  source 1..19: mol_type = other RNA
ggaacctgacagtataggt

SEQ ID NO: 37 - RNA, 19 nt, synthetic construct
  source 1..19: mol_type = other RNA
gaacctgacagtataggtt

SEQ ID NO: 38 - RNA, 19 nt, synthetic construct
  source 1..19: mol_type = other RNA
aacctgacagtataggttg

SEQ ID NO: 39 - RNA, 19 nt, synthetic construct
  source 1..19: mol_type = other RNA
acctgacagtataggttgg

SEQ ID NO: 40 - RNA, 19 nt, synthetic construct
  source 1..19: mol_type = other RNA
cctgacagtataggttggg

SEQ ID NO: 41 - RNA, 19 nt, synthetic construct
  source 1..19: mol_type = other RNA
ctgacagtataggttgggg

SEQ ID NO: 42 - RNA, 19 nt, synthetic construct
  source 1..19: mol_type = other RNA
tgacagtataggttggggg

SEQ ID NO: 43 - RNA, 19 nt, synthetic construct
  source 1..19: mol_type = other RNA
gacagtataggttgggggc

SEQ ID NO: 44 - RNA, 19 nt, synthetic construct
  source 1..19: mol_type = other RNA
acagtataggttgggggcc

SEQ ID NO: 45 - RNA, 19 nt, synthetic construct
  source 1..19: mol_type = other RNA
cagtataggttgggggcca

SEQ ID NO: 46 - RNA, 19 nt, synthetic construct
  source 1..19: mol_type = other RNA
agtataggttgggggccag

SEQ ID NO: 47 - RNA, 19 nt, synthetic construct
  source 1..19: mol_type = other RNA
gtataggttgggggccagg

SEQ ID NO: 48 - RNA, 19 nt, synthetic construct
  source 1..19: mol_type = other RNA
tataggttgggggccagga

SEQ ID NO: 49 - RNA, 19 nt, synthetic construct
  source 1..19: mol_type = other RNA
ataggttgggggccaggat

SEQ ID NO: 50 - RNA, 19 nt, synthetic construct
  source 1..19: mol_type = other RNA
taggttgggggccaggatg

SEQ ID NO: 51 - RNA, 19 nt, synthetic construct
  source 1..19: mol_type = other RNA
aggttgggggccaggatga

SEQ ID NO: 52 - RNA, 19 nt, synthetic construct
  source 1..19: mol_type = other RNA
ggttgggggccaggatgag

SEQ ID NO: 53 - RNA, 19 nt, synthetic construct
  source 1..19: mol_type = other RNA
gttgggggccaggatgagg

SEQ ID NO: 54 - RNA, 19 nt, synthetic construct
  source 1..19: mol_type = other RNA
ttgggggccaggatgagga

SEQ ID NO: 55 - RNA, 19 nt, synthetic construct
  source 1..19: mol_type = other RNA
tgggggccaggatgaggaa

SEQ ID NO: 56 - RNA, 19 nt, synthetic construct
  source 1..19: mol_type = other RNA
gggggccaggatgaggaaa

SEQ ID NO: 57 - RNA, 19 nt, synthetic construct
  source 1..19: mol_type = other RNA
ggggccaggatgaggaaaa

SEQ ID NO: 58 - RNA, 19 nt, synthetic construct
  source 1..19: mol_type = other RNA
gggccaggatgaggaaaaa

SEQ ID NO: 59 - RNA, 19 nt, synthetic construct
  source 1..19: mol_type = other RNA
ggccaggatgaggaaaaag

SEQ ID NO: 60 - RNA, 19 nt, synthetic construct
  source 1..19: mol_type = other RNA
gccaggatgaggaaaaagg

SEQ ID NO: 61 - RNA, 19 nt, synthetic construct
  source 1..19: mol_type = other RNA
ccaggatgaggaaaaagga

SEQ ID NO: 62 - RNA, 19 nt, synthetic construct
  source 1..19: mol_type = other RNA
caggatgaggaaaaaggaa

SEQ ID NO: 63 - RNA, 19 nt, synthetic construct
  source 1..19: mol_type = other RNA
aggatgaggaaaaaggaac

SEQ ID NO: 64 - RNA, 19 nt, synthetic construct
  source 1..19: mol_type = other RNA
ggatgaggaaaaaggaacg

SEQ ID NO: 65 - RNA, 19 nt, synthetic construct
  source 1..19: mol_type = other RNA
gatgaggaaaaaggaacgg

SEQ ID NO: 66 - RNA, 19 nt, synthetic construct
  source 1..19: mol_type = other RNA
atgaggaaaaaggaacggg

SEQ ID NO: 67 - RNA, 19 nt, synthetic construct
  source 1..19: mol_type = other RNA
tgaggaaaaaggaacggga

SEQ ID NO: 68 - RNA, 19 nt, synthetic construct
  source 1..19: mol_type = other RNA
gaggaaaaaggaacgggaa

SEQ ID NO: 69 - RNA, 19 nt, synthetic construct
  source 1..19: mol_type = other RNA
aggaaaaaggaacgggaaa

SEQ ID NO: 70 - RNA, 19 nt, synthetic construct
  source 1..19: mol_type = other RNA
ggaaaaaggaacgggaaag

SEQ ID NO: 71 - RNA, 19 nt, synthetic construct
  source 1..19: mol_type = other RNA
gaaaaaggaacgggaaaga

SEQ ID NO: 72 - RNA, 19 nt, synthetic construct
  source 1..19: mol_type = other RNA
aaaaaggaacgggaaagac

SEQ ID NO: 73 - RNA, 19 nt, synthetic construct
  source 1..19: mol_type = other RNA
aaaaggaacgggaaagacc

SEQ ID NO: 74 - RNA, 19 nt, synthetic construct
  source 1..19: mol_type = other RNA
aaaggaacgggaaagacct

SEQ ID NO: 75 - RNA, 19 nt, synthetic construct
  source 1..19: mol_type = other RNA
aaggaacgggaaagacctg

SEQ ID NO: 76 - RNA, 19 nt, synthetic construct
  source 1..19: mol_type = other RNA
aggaacgggaaagacctgc

SEQ ID NO: 77 - RNA, 19 nt, synthetic construct
  source 1..19: mol_type = other RNA
ggaacgggaaagacctgcc

SEQ ID NO: 78 - RNA, 19 nt, synthetic construct
  source 1..19: mol_type = other RNA
gaacgggaaagacctgccc

SEQ ID NO: 79 - RNA, 19 nt, synthetic construct
  source 1..19: mol_type = other RNA
aacgggaaagacctgccca

SEQ ID NO: 80 - RNA, 19 nt, synthetic construct
  source 1..19: mol_type = other RNA
acgggaaagacctgcccac

SEQ ID NO: 81 - RNA, 19 nt, synthetic construct
  source 1..19: mol_type = other RNA
cgggaaagacctgcccacc

SEQ ID NO: 82 - RNA, 19 nt, synthetic construct
  source 1..19: mol_type = other RNA
gggaaagacctgcccaccc

SEQ ID NO: 83 - RNA, 19 nt, synthetic construct
  source 1..19: mol_type = other RNA
ggaaagacctgcccaccct

SEQ ID NO: 84 - RNA, 19 nt, synthetic construct
  source 1..19: mol_type = other RNA
gaaagacctgcccaccctt

SEQ ID NO: 85 - RNA, 19 nt, synthetic construct
  source 1..19: mol_type = other RNA
aaagacctgcccacccttc

SEQ ID NO: 86 - RNA, 19 nt, synthetic construct
  source 1..19: mol_type = other RNA
aagacctgcccacccttct

SEQ ID NO: 87 - RNA, 19 nt, synthetic construct
  source 1..19: mol_type = other RNA
agacctgcccacccttctg

SEQ ID NO: 88 - RNA, 19 nt, synthetic construct
  source 1..19: mol_type = other RNA
gacctgcccacccttctgg

SEQ ID NO: 89 - RNA, 19 nt, synthetic construct
  source 1..19: mol_type = other RNA
acctgcccacccttctggt

SEQ ID NO: 90 - RNA, 19 nt, synthetic construct
  source 1..19: mol_type = other RNA
cctgcccacccttctggta

SEQ ID NO: 91 - RNA, 19 nt, synthetic construct
  source 1..19: mol_type = other RNA
ctgcccacccttctggtaa

SEQ ID NO: 92 - RNA, 19 nt, synthetic construct
  source 1..19: mol_type = other RNA
tgcccacccttctggtaag

SEQ ID NO: 93 - RNA, 19 nt, synthetic construct
  source 1..19: mol_type = other RNA
gcccacccttctggtaagg

SEQ ID NO: 94 - RNA, 19 nt, synthetic construct
  source 1..19: mol_type = other RNA
cccacccttctggtaagga

SEQ ID NO: 95 - RNA, 19 nt, synthetic construct
  source 1..19: mol_type = other RNA
ccacccttctggtaaggag

SEQ ID NO: 96 - RNA, 19 nt, synthetic construct
  source 1..19: mol_type = other RNA
cacccttctggtaaggagg

SEQ ID NO: 97 - RNA, 19 nt, synthetic construct
  source 1..19: mol_type = other RNA
acccttctggtaaggaggc

SEQ ID NO: 98 - RNA, 19 nt, synthetic construct
  source 1..19: mol_type = other RNA
cccttctggtaaggaggcc

SEQ ID NO: 99 - RNA, 19 nt, synthetic construct
  source 1..19: mol_type = other RNA
ccttctggtaaggaggccc

SEQ ID NO: 100 - RNA, 19 nt, synthetic construct
  source 1..19: mol_type = other RNA
cttctggtaaggaggcccc

SEQ ID NO: 101 - RNA, 19 nt, synthetic construct
  source 1..19: mol_type = other RNA
ttctggtaaggaggccccg

SEQ ID NO: 102 - RNA, 19 nt, synthetic construct
  source 1..19: mol_type = other RNA
tctggtaaggaggccccgt

SEQ ID NO: 103 - RNA, 19 nt, synthetic construct
  source 1..19: mol_type = other RNA
ctggtaaggaggccccgtg

SEQ ID NO: 104 - RNA, 19 nt, synthetic construct
  source 1..19: mol_type = other RNA
tggtaaggaggccccgtga

SEQ ID NO: 105 - RNA, 19 nt, synthetic construct
  source 1..19: mol_type = other RNA
ggtaaggaggccccgtgat

SEQ ID NO: 106 - RNA, 19 nt, synthetic construct
  source 1..19: mol_type = other RNA
gtaaggaggccccgtgatc

SEQ ID NO: 107 - RNA, 19 nt, synthetic construct
  source 1..19: mol_type = other RNA
taaggaggccccgtgatca

SEQ ID NO: 108 - RNA, 19 nt, synthetic construct
  source 1..19: mol_type = other RNA
aaggaggccccgtgatcag

SEQ ID NO: 109 - RNA, 19 nt, synthetic construct
  source 1..19: mol_type = other RNA
aggaggccccgtgatcagc

SEQ ID NO: 110 - RNA, 19 nt, synthetic construct
  source 1..19: mol_type = other RNA
ggaggccccgtgatcagct

SEQ ID NO: 111 - RNA, 19 nt, synthetic construct
  source 1..19: mol_type = other RNA
gaggccccgtgatcagctc

SEQ ID NO: 112 - RNA, 19 nt, synthetic construct
  source 1..19: mol_type = other RNA
aggccccgtgatcagctcc

SEQ ID NO: 113 - RNA, 19 nt, synthetic construct
  source 1..19: mol_type = other RNA
ggccccgtgatcagctcca

SEQ ID NO: 114 - RNA, 19 nt, synthetic construct
  source 1..19: mol_type = other RNA
gccccgtgatcagctccag

SEQ ID NO: 115 - RNA, 19 nt, synthetic construct
  source 1..19: mol_type = other RNA
ccccgtgatcagctccagc

SEQ ID NO: 116 - RNA, 19 nt, synthetic construct
  source 1..19: mol_type = other RNA
cccgtgatcagctccagcc

SEQ ID NO: 117 - RNA, 19 nt, synthetic construct
  source 1..19: mol_type = other RNA
ccgtgatcagctccagcca

SEQ ID NO: 118 - RNA, 19 nt, synthetic construct
  source 1..19: mol_type = other RNA
cgtgatcagctccagccat

SEQ ID NO: 119 - RNA, 19 nt, synthetic construct
  source 1..19: mol_type = other RNA
gtgatcagctccagccatt

SEQ ID NO: 120 - RNA, 19 nt, synthetic construct
  source 1..19: mol_type = other RNA
tgatcagctccagccattt

SEQ ID NO: 121 - RNA, 19 nt, synthetic construct
  source 1..19: mol_type = other RNA
gatcagctccagccatttg

SEQ ID NO: 122 - RNA, 19 nt, synthetic construct
  source 1..19: mol_type = other RNA
atcagctccagccatttgc

SEQ ID NO: 123 - RNA, 19 nt, synthetic construct
  source 1..19: mol_type = other RNA
tcagctccagccatttgca

SEQ ID NO: 124 - RNA, 19 nt, synthetic construct
  source 1..19: mol_type = other RNA
cagctccagccatttgcag

SEQ ID NO: 125 - RNA, 19 nt, synthetic construct
  source 1..19: mol_type = other RNA
agctccagccatttgcagt

SEQ ID NO: 126 - RNA, 19 nt, synthetic construct
  source 1..19: mol_type = other RNA
gctccagccatttgcagtc

SEQ ID NO: 127 - RNA, 19 nt, synthetic construct
  source 1..19: mol_type = other RNA
ctccagccatttgcagtcc

SEQ ID NO: 128 - RNA, 19 nt, synthetic construct
  source 1..19: mol_type = other RNA
tccagccatttgcagtcct

SEQ ID NO: 129 - RNA, 19 nt, synthetic construct
  source 1..19: mol_type = other RNA
ccagccatttgcagtcctg

SEQ ID NO: 130 - RNA, 19 nt, synthetic construct
  source 1..19: mol_type = other RNA
cagccatttgcagtcctgg

SEQ ID NO: 131 - RNA, 19 nt, synthetic construct
  source 1..19: mol_type = other RNA
agccatttgcagtcctggc

SEQ ID NO: 132 - RNA, 19 nt, synthetic construct
  source 1..19: mol_type = other RNA
gccatttgcagtcctggct

SEQ ID NO: 133 - RNA, 19 nt, synthetic construct
  source 1..19: mol_type = other RNA
ccatttgcagtcctggcta

SEQ ID NO: 134 - RNA, 19 nt, synthetic construct
  source 1..19: mol_type = other RNA
catttgcagtcctggctat

SEQ ID NO: 135 - RNA, 19 nt, synthetic construct
  source 1..19: mol_type = other RNA
atttgcagtcctggctatc

SEQ ID NO: 136 - RNA, 19 nt, synthetic construct
  source 1..19: mol_type = other RNA
tttgcagtcctggctatcc

SEQ ID NO: 137 - RNA, 19 nt, synthetic construct
  source 1..19: mol_type = other RNA
ttgcagtcctggctatccc

SEQ ID NO: 138 - RNA, 19 nt, synthetic construct
  source 1..19: mol_type = other RNA
tgcagtcctggctatccca

SEQ ID NO: 139 - RNA, 19 nt, synthetic construct
  source 1..19: mol_type = other RNA
gcagtcctggctatcccag

SEQ ID NO: 140 - RNA, 19 nt, synthetic construct
  source 1..19: mol_type = other RNA
cagtcctggctatcccagg

SEQ ID NO: 141 - RNA, 19 nt, synthetic construct
  source 1..19: mol_type = other RNA
agtcctggctatcccagga

SEQ ID NO: 142 - RNA, 19 nt, synthetic construct
  source 1..19: mol_type = other RNA
gtcctggctatcccaggag

SEQ ID NO: 143 - RNA, 19 nt, synthetic construct
  source 1..19: mol_type = other RNA
tcctggctatcccaggagc

SEQ ID NO: 144 - RNA, 19 nt, synthetic construct
  source 1..19: mol_type = other RNA
cctggctatcccaggagct

SEQ ID NO: 145 - RNA, 19 nt, synthetic construct
  source 1..19: mol_type = other RNA
ctggctatcccaggagctt

SEQ ID NO: 146 - RNA, 19 nt, synthetic construct
  source 1..19: mol_type = other RNA
tggctatcccaggagctta

SEQ ID NO: 147 - RNA, 19 nt, synthetic construct
  source 1..19: mol_type = other RNA
ggctatcccaggagcttac

SEQ ID NO: 148 - RNA, 19 nt, synthetic construct
  source 1..19: mol_type = other RNA
gctatcccaggagcttaca

SEQ ID NO: 149 - RNA, 19 nt, synthetic construct
  source 1..19: mol_type = other RNA
ctatcccaggagcttacat

SEQ ID NO: 150 - RNA, 19 nt, synthetic construct
  source 1..19: mol_type = other RNA
tatcccaggagcttacata

SEQ ID NO: 151 - RNA, 19 nt, synthetic construct
  source 1..19: mol_type = other RNA
atcccaggagcttacataa

SEQ ID NO: 152 - RNA, 19 nt, synthetic construct
  source 1..19: mol_type = other RNA
tcccaggagcttacataaa

SEQ ID NO: 153 - RNA, 19 nt, synthetic construct
  source 1..19: mol_type = other RNA
cccaggagcttacataaag

SEQ ID NO: 154 - RNA, 19 nt, synthetic construct
  source 1..19: mol_type = other RNA
ccaggagcttacataaagg

SEQ ID NO: 155 - RNA, 19 nt, synthetic construct
  source 1..19: mol_type = other RNA
caggagcttacataaaggg

SEQ ID NO: 156 - RNA, 19 nt, synthetic construct
  source 1..19: mol_type = other RNA
aggagcttacataaaggga

SEQ ID NO: 157 - RNA, 19 nt, synthetic construct
  source 1..19: mol_type = other RNA
ggagcttacataaagggac

SEQ ID NO: 158 - RNA, 19 nt, synthetic construct
  source 1..19: mol_type = other RNA
gagcttacataaagggaca

SEQ ID NO: 159 - RNA, 19 nt, synthetic construct
  source 1..19: mol_type = other RNA
agcttacataaagggacaa

SEQ ID NO: 160 - RNA, 19 nt, synthetic construct
  source 1..19: mol_type = other RNA
gcttacataaagggacaat

SEQ ID NO: 161 - RNA, 19 nt, synthetic construct
  source 1..19: mol_type = other RNA
cttacataaagggacaatt

SEQ ID NO: 162 - RNA, 19 nt, synthetic construct
  source 1..19: mol_type = other RNA
ttacataaagggacaattg

SEQ ID NO: 163 - RNA, 19 nt, synthetic construct
  source 1..19: mol_type = other RNA
tacataaagggacaattgg

SEQ ID NO: 164 - RNA, 19 nt, synthetic construct
  source 1..19: mol_type = other RNA
acataaagggacaattgga

SEQ ID NO: 165 - RNA, 19 nt, synthetic construct
  source 1..19: mol_type = other RNA
cataaagggacaattggag

SEQ ID NO: 166 - RNA, 19 nt, synthetic construct
  source 1..19: mol_type = other RNA
ataaagggacaattggagc

SEQ ID NO: 167 - RNA, 19 nt, synthetic construct
  source 1..19: mol_type = other RNA
taaagggacaattggagcc

SEQ ID NO: 168 - RNA, 19 nt, synthetic construct
  source 1..19: mol_type = other RNA
aaagggacaattggagcct

SEQ ID NO: 169 - RNA, 19 nt, synthetic construct
  source 1..19: mol_type = other RNA
aagggacaattggagcctg

SEQ ID NO: 170 - RNA, 19 nt, synthetic construct
  source 1..19: mol_type = other RNA
agggacaattggagcctga

SEQ ID NO: 171 - RNA, 19 nt, synthetic construct
  source 1..19: mol_type = other RNA
gggacaattggagcctgag

SEQ ID NO: 172 - RNA, 19 nt, synthetic construct
  source 1..19: mol_type = other RNA
ggacaattggagcctgaga

SEQ ID NO: 173 - RNA, 19 nt, synthetic construct
  source 1..19: mol_type = other RNA
gacaattggagcctgagag

SEQ ID NO: 174 - RNA, 19 nt, synthetic construct
  source 1..19: mol_type = other RNA
acaattggagcctgagagg

SEQ ID NO: 175 - RNA, 19 nt, synthetic construct
  source 1..19: mol_type = other RNA
caattggagcctgagaggt

SEQ ID NO: 176 - RNA, 19 nt, synthetic construct
  source 1..19: mol_type = other RNA
aattggagcctgagaggtg

SEQ ID NO: 177 - RNA, 19 nt, synthetic construct
  source 1..19: mol_type = other RNA
attggagcctgagaggtga

SEQ ID NO: 178 - RNA, 19 nt, synthetic construct
  source 1..19: mol_type = other RNA
ttggagcctgagaggtgac

SEQ ID NO: 179 - RNA, 19 nt, synthetic construct
  source 1..19: mol_type = other RNA
tggagcctgagaggtgaca

SEQ ID NO: 180 - RNA, 19 nt, synthetic construct
  source 1..19: mol_type = other RNA
ggagcctgagaggtgacag

SEQ ID NO: 181 - RNA, 19 nt, synthetic construct
  source 1..19: mol_type = other RNA
gagcctgagaggtgacagt

SEQ ID NO: 182 - RNA, 19 nt, synthetic construct
  source 1..19: mol_type = other RNA
agcctgagaggtgacagtg

SEQ ID NO: 183 - RNA, 19 nt, synthetic construct
  source 1..19: mol_type = other RNA
gcctgagaggtgacagtgc

SEQ ID NO: 184 - RNA, 19 nt, synthetic construct
  source 1..19: mol_type = other RNA
cctgagaggtgacagtgct

SEQ ID NO: 185 - RNA, 19 nt, synthetic construct
  source 1..19: mol_type = other RNA
ctgagaggtgacagtgctg

SEQ ID NO: 186 - RNA, 19 nt, synthetic construct
  source 1..19: mol_type = other RNA
tgagaggtgacagtgctga

SEQ ID NO: 187 - RNA, 19 nt, synthetic construct
  source 1..19: mol_type = other RNA
gagaggtgacagtgctgac

SEQ ID NO: 188 - RNA, 19 nt, synthetic construct
  source 1..19: mol_type = other RNA
agaggtgacagtgctgaca

SEQ ID NO: 189 - RNA, 19 nt, synthetic construct
  source 1..19: mol_type = other RNA
gaggtgacagtgctgacac

SEQ ID NO: 190 - RNA, 19 nt, synthetic construct
  source 1..19: mol_type = other RNA
aggtgacagtgctgacact

SEQ ID NO: 191 - RNA, 19 nt, synthetic construct
  source 1..19: mol_type = other RNA
ggtgacagtgctgacacta

SEQ ID NO: 192 - RNA, 19 nt, synthetic construct
  source 1..19: mol_type = other RNA
gtgacagtgctgacactac

SEQ ID NO: 193 - RNA, 19 nt, synthetic construct
  source 1..19: mol_type = other RNA
tgacagtgctgacactaca

SEQ ID NO: 194 - RNA, 19 nt, synthetic construct
  source 1..19: mol_type = other RNA
gacagtgctgacactacaa

SEQ ID NO: 195 - RNA, 19 nt, synthetic construct
  source 1..19: mol_type = other RNA
acagtgctgacactacaag

SEQ ID NO: 196 - RNA, 19 nt, synthetic construct
  source 1..19: mol_type = other RNA
cagtgctgacactacaagg

SEQ ID NO: 197 - RNA, 19 nt, synthetic construct
  source 1..19: mol_type = other RNA
agtgctgacactacaaggc

SEQ ID NO: 198 - RNA, 19 nt, synthetic construct
  source 1..19: mol_type = other RNA
gtgctgacactacaaggct

SEQ ID NO: 199 - RNA, 19 nt, synthetic construct
  source 1..19: mol_type = other RNA
tgctgacactacaaggctc

SEQ ID NO: 200 - RNA, 19 nt, synthetic construct
  source 1..19: mol_type = other RNA
gctgacactacaaggctcg

SEQ ID NO: 201 - RNA, 19 nt, synthetic construct
  source 1..19: mol_type = other RNA
ctgacactacaaggctcgg

SEQ ID NO: 202 - RNA, 19 nt, synthetic construct
  source 1..19: mol_type = other RNA
tgacactacaaggctcgga

SEQ ID NO: 203 - RNA, 19 nt, synthetic construct
  source 1..19: mol_type = other RNA
gacactacaaggctcggag

SEQ ID NO: 204 - RNA, 19 nt, synthetic construct
  source 1..19: mol_type = other RNA
acactacaaggctcggagc

SEQ ID NO: 205 - RNA, 19 nt, synthetic construct
  source 1..19: mol_type = other RNA
cactacaaggctcggagct

SEQ ID NO: 206 - RNA, 19 nt, synthetic construct
  source 1..19: mol_type = other RNA
actacaaggctcggagctc

SEQ ID NO: 207 - RNA, 19 nt, synthetic construct
  source 1..19: mol_type = other RNA
ctacaaggctcggagctcc

SEQ ID NO: 208 - RNA, 19 nt, synthetic construct
  source 1..19: mol_type = other RNA
tacaaggctcggagctccg

SEQ ID NO: 209 - RNA, 19 nt, synthetic construct
  source 1..19: mol_type = other RNA
acaaggctcggagctccgg

SEQ ID NO: 210 - RNA, 19 nt, synthetic construct
  source 1..19: mol_type = other RNA
caaggctcggagctccggg

SEQ ID NO: 211 - RNA, 19 nt, synthetic construct
  source 1..19: mol_type = other RNA
aaggctcggagctccgggc

SEQ ID NO: 212 - RNA, 19 nt, synthetic construct
  source 1..19: mol_type = other RNA
aggctcggagctccgggca

SEQ ID NO: 213 - RNA, 19 nt, synthetic construct
  source 1..19: mol_type = other RNA
ggctcggagctccgggcac

SEQ ID NO: 214 - RNA, 19 nt, synthetic construct
  source 1..19: mol_type = other RNA
gctcggagctccgggcact

SEQ ID NO: 215 - RNA, 19 nt, synthetic construct
  source 1..19: mol_type = other RNA
ctcggagctccgggcactc

SEQ ID NO: 216 - RNA, 19 nt, synthetic construct
  source 1..19: mol_type = other RNA
tcggagctccgggcactca

SEQ ID NO: 217 - RNA, 19 nt, synthetic construct
  source 1..19: mol_type = other RNA
cggagctccgggcactcag

SEQ ID NO: 218 - RNA, 19 nt, synthetic construct
  source 1..19: mol_type = other RNA
ggagctccgggcactcaga

SEQ ID NO: 219 - RNA, 19 nt, synthetic construct
  source 1..19: mol_type = other RNA
gagctccgggcactcagac

SEQ ID NO: 220 - RNA, 19 nt, synthetic construct
  source 1..19: mol_type = other RNA
agctccgggcactcagaca

SEQ ID NO: 221 - RNA, 19 nt, synthetic construct
  source 1..19: mol_type = other RNA
gctccgggcactcagacat

SEQ ID NO: 222 - RNA, 19 nt, synthetic construct
  source 1..19: mol_type = other RNA
ctccgggcactcagacatc

SEQ ID NO: 223 - RNA, 19 nt, synthetic construct
  source 1..19: mol_type = other RNA
tccgggcactcagacatca

SEQ ID NO: 224 - RNA, 19 nt, synthetic construct
  source 1..19: mol_type = other RNA
ccgggcactcagacatcat

SEQ ID NO: 225 - RNA, 19 nt, synthetic construct
  source 1..19: mol_type = other RNA
cgggcactcagacatcatg

SEQ ID NO: 226 - RNA, 19 nt, synthetic construct
  source 1..19: mol_type = other RNA
gggcactcagacatcatga

SEQ ID NO: 227 - RNA, 19 nt, synthetic construct
  source 1..19: mol_type = other RNA
ggcactcagacatcatgag

SEQ ID NO: 228 - RNA, 19 nt, synthetic construct
  source 1..19: mol_type = other RNA
gcactcagacatcatgagt

SEQ ID NO: 229 - RNA, 19 nt, synthetic construct
  source 1..19: mol_type = other RNA
cactcagacatcatgagtt

SEQ ID NO: 230 - RNA, 19 nt, synthetic construct
  source 1..19: mol_type = other RNA
actcagacatcatgagttg

SEQ ID NO: 231 - RNA, 19 nt, synthetic construct
  source 1..19: mol_type = other RNA
ctcagacatcatgagttgg

SEQ ID NO: 232 - RNA, 19 nt, synthetic construct
  source 1..19: mol_type = other RNA
tcagacatcatgagttggt

SEQ ID NO: 233 - RNA, 19 nt, synthetic construct
  source 1..19: mol_type = other RNA
cagacatcatgagttggtc

SEQ ID NO: 234 - RNA, 19 nt, synthetic construct
  source 1..19: mol_type = other RNA
agacatcatgagttggtcc

SEQ ID NO: 235 - RNA, 19 nt, synthetic construct
  source 1..19: mol_type = other RNA
gacatcatgagttggtcct

SEQ ID NO: 236 - RNA, 19 nt, synthetic construct
  source 1..19: mol_type = other RNA
acatcatgagttggtcctt

SEQ ID NO: 237 - RNA, 19 nt, synthetic construct
  source 1..19: mol_type = other RNA
catcatgagttggtccttg

SEQ ID NO: 238 - RNA, 19 nt, synthetic construct
  source 1..19: mol_type = other RNA
atcatgagttggtccttgc

SEQ ID NO: 239 - RNA, 19 nt, synthetic construct
  source 1..19: mol_type = other RNA
tcatgagttggtccttgca

SEQ ID NO: 240 - RNA, 19 nt, synthetic construct
  source 1..19: mol_type = other RNA
catgagttggtccttgcac

SEQ ID NO: 241 - RNA, 19 nt, synthetic construct
  source 1..19: mol_type = other RNA
atgagttggtccttgcacc

SEQ ID NO: 242 - RNA, 19 nt, synthetic construct
  source 1..19: mol_type = other RNA
tgagttggtccttgcaccc

SEQ ID NO: 243 - RNA, 19 nt, synthetic construct
  source 1..19: mol_type = other RNA
gagttggtccttgcacccc

SEQ ID NO: 244 - RNA, 19 nt, synthetic construct
  source 1..19: mol_type = other RNA
agttggtccttgcaccccc

SEQ ID NO: 245 - RNA, 19 nt, synthetic construct
  source 1..19: mol_type = other RNA
gttggtccttgcacccccg

SEQ ID NO: 246 - RNA, 19 nt, synthetic construct
  source 1..19: mol_type = other RNA
ttggtccttgcacccccgg

SEQ ID NO: 247 - RNA, 19 nt, synthetic construct
  source 1..19: mol_type = other RNA
tggtccttgcacccccgga

SEQ ID NO: 248 - RNA, 19 nt, synthetic construct
  source 1..19: mol_type = other RNA
ggtccttgcacccccggaa

SEQ ID NO: 249 - RNA, 19 nt, synthetic construct
  source 1..19: mol_type = other RNA
gtccttgcacccccggaat

SEQ ID NO: 250 - RNA, 19 nt, synthetic construct
  source 1..19: mol_type = other RNA
tccttgcacccccggaatt

SEQ ID NO: 251 - RNA, 19 nt, synthetic construct
  source 1..19: mol_type = other RNA
ccttgcacccccggaattt

SEQ ID NO: 252 - RNA, 19 nt, synthetic construct
  source 1..19: mol_type = other RNA
cttgcacccccggaattta

SEQ ID NO: 253 - RNA, 19 nt, synthetic construct
  source 1..19: mol_type = other RNA
ttgcacccccggaatttaa

SEQ ID NO: 254 - RNA, 19 nt, synthetic construct
  source 1..19: mol_type = other RNA
tgcacccccggaatttaat

SEQ ID NO: 255 - RNA, 19 nt, synthetic construct
  source 1..19: mol_type = other RNA
gcacccccggaatttaatt

SEQ ID NO: 256 - RNA, 19 nt, synthetic construct
  source 1..19: mol_type = other RNA
cacccccggaatttaattc

SEQ ID NO: 257 - RNA, 19 nt, synthetic construct
  source 1..19: mol_type = other RNA
acccccggaatttaattct

SEQ ID NO: 258 - RNA, 19 nt, synthetic construct
  source 1..19: mol_type = other RNA
cccccggaatttaattctc

SEQ ID NO: 259 - RNA, 19 nt, synthetic construct
  source 1..19: mol_type = other RNA
ccccggaatttaattctct

SEQ ID NO: 260 - RNA, 19 nt, synthetic construct
  source 1..19: mol_type = other RNA
cccggaatttaattctcta

SEQ ID NO: 261 - RNA, 19 nt, synthetic construct
  source 1..19: mol_type = other RNA
ccggaatttaattctctac

SEQ ID NO: 262 - RNA, 19 nt, synthetic construct
  source 1..19: mol_type = other RNA
cggaatttaattctctact

SEQ ID NO: 263 - RNA, 19 nt, synthetic construct
  source 1..19: mol_type = other RNA
ggaatttaattctctactt

SEQ ID NO: 264 - RNA, 19 nt, synthetic construct
  source 1..19: mol_type = other RNA
gaatttaattctctacttc

SEQ ID NO: 265 - RNA, 19 nt, synthetic construct
  source 1..19: mol_type = other RNA
aatttaattctctacttct

SEQ ID NO: 266 - RNA, 19 nt, synthetic construct
  source 1..19: mol_type = other RNA
atttaattctctacttcta

SEQ ID NO: 267 - RNA, 19 nt, synthetic construct
  source 1..19: mol_type = other RNA
tttaattctctacttctat

SEQ ID NO: 268 - RNA, 19 nt, synthetic construct
  source 1..19: mol_type = other RNA
ttaattctctacttctatg

SEQ ID NO: 269 - RNA, 19 nt, synthetic construct
  source 1..19: mol_type = other RNA
taattctctacttctatgc

SEQ ID NO: 270 - RNA, 19 nt, synthetic construct
  source 1..19: mol_type = other RNA
aattctctacttctatgct

SEQ ID NO: 271 - RNA, 19 nt, synthetic construct
  source 1..19: mol_type = other RNA
attctctacttctatgctc

SEQ ID NO: 272 - RNA, 19 nt, synthetic construct
  source 1..19: mol_type = other RNA
ttctctacttctatgctct

SEQ ID NO: 273 - RNA, 19 nt, synthetic construct
  source 1..19: mol_type = other RNA
tctctacttctatgctctt

SEQ ID NO: 274 - RNA, 19 nt, synthetic construct
  source 1..19: mol_type = other RNA
ctctacttctatgctcttt

SEQ ID NO: 275 - RNA, 19 nt, synthetic construct
  source 1..19: mol_type = other RNA
tctacttctatgctctttt

SEQ ID NO: 276 - RNA, 19 nt, synthetic construct
  source 1..19: mol_type = other RNA
ctacttctatgctctttta

SEQ ID NO: 277 - RNA, 19 nt, synthetic construct
  source 1..19: mol_type = other RNA
tacttctatgctcttttat

SEQ ID NO: 278 - RNA, 19 nt, synthetic construct
  source 1..19: mol_type = other RNA
acttctatgctcttttatt

SEQ ID NO: 279 - RNA, 19 nt, synthetic construct
  source 1..19: mol_type = other RNA
cttctatgctcttttattt

SEQ ID NO: 280 - RNA, 19 nt, synthetic construct
  source 1..19: mol_type = other RNA
ttctatgctcttttatttc

SEQ ID NO: 281 - RNA, 19 nt, synthetic construct
  source 1..19: mol_type = other RNA
tctatgctcttttatttct

SEQ ID NO: 282 - RNA, 19 nt, synthetic construct
  source 1..19: mol_type = other RNA
ctatgctcttttatttctc

SEQ ID NO: 283 - RNA, 19 nt, synthetic construct
  source 1..19: mol_type = other RNA
tatgctcttttatttctct

SEQ ID NO: 284 - RNA, 19 nt, synthetic construct
  source 1..19: mol_type = other RNA
atgctcttttatttctctc

SEQ ID NO: 285 - RNA, 19 nt, synthetic construct
  source 1..19: mol_type = other RNA
tgctcttttatttctctct

SEQ ID NO: 286 - RNA, 19 nt, synthetic construct
  source 1..19: mol_type = other RNA
gctcttttatttctctctt

SEQ ID NO: 287 - RNA, 19 nt, synthetic construct
  source 1..19: mol_type = other RNA
ctcttttatttctctcttc

SEQ ID NO: 288 - RNA, 19 nt, synthetic construct
  source 1..19: mol_type = other RNA
tcttttatttctctcttca

SEQ ID NO: 289 - RNA, 19 nt, synthetic construct
  source 1..19: mol_type = other RNA
cttttatttctctcttcaa

SEQ ID NO: 290 - RNA, 19 nt, synthetic construct
  source 1..19: mol_type = other RNA
ttttatttctctcttcaac

SEQ ID NO: 291 - RNA, 19 nt, synthetic construct
  source 1..19: mol_type = other RNA
tttatttctctcttcaaca

SEQ ID NO: 292 - RNA, 19 nt, synthetic construct
  source 1..19: mol_type = other RNA
ttatttctctcttcaacat

SEQ ID NO: 293 - RNA, 19 nt, synthetic construct
  source 1..19: mol_type = other RNA
tatttctctcttcaacatg

SEQ ID NO: 294 - RNA, 19 nt, synthetic construct
  source 1..19: mol_type = other RNA
atttctctcttcaacatgt

SEQ ID NO: 295 - RNA, 19 nt, synthetic construct
  source 1..19: mol_type = other RNA
tttctctcttcaacatgtg

SEQ ID NO: 296 - RNA, 19 nt, synthetic construct
  source 1..19: mol_type = other RNA
ttctctcttcaacatgtgt

SEQ ID NO: 297 - RNA, 19 nt, synthetic construct
  source 1..19: mol_type = other RNA
tctctcttcaacatgtgta

SEQ ID NO: 298 - RNA, 19 nt, synthetic construct
  source 1..19: mol_type = other RNA
ctctcttcaacatgtgtag

SEQ ID NO: 299 - RNA, 19 nt, synthetic construct
  source 1..19: mol_type = other RNA
tctcttcaacatgtgtagc

SEQ ID NO: 300 - RNA, 19 nt, synthetic construct
  source 1..19: mol_type = other RNA
ctcttcaacatgtgtagca

SEQ ID NO: 301 - RNA, 19 nt, synthetic construct
  source 1..19: mol_type = other RNA
tcttcaacatgtgtagcat

SEQ ID NO: 302 - RNA, 19 nt, synthetic construct
  source 1..19: mol_type = other RNA
cttcaacatgtgtagcata

SEQ ID NO: 303 - RNA, 19 nt, synthetic construct
  source 1..19: mol_type = other RNA
ttcaacatgtgtagcatat

SEQ ID NO: 304 - RNA, 19 nt, synthetic construct
  source 1..19: mol_type = other RNA
tcaacatgtgtagcatatg

SEQ ID NO: 305 - RNA, 19 nt, synthetic construct
  source 1..19: mol_type = other RNA
caacatgtgtagcatatgt

SEQ ID NO: 306 - RNA, 19 nt, synthetic construct
  source 1..19: mol_type = other RNA
aacatgtgtagcatatgtt

SEQ ID NO: 307 - RNA, 19 nt, synthetic construct
  source 1..19: mol_type = other RNA
acatgtgtagcatatgttg

SEQ ID NO: 308 - RNA, 19 nt, synthetic construct
  source 1..19: mol_type = other RNA
catgtgtagcatatgttgc

SEQ ID NO: 309 - RNA, 19 nt, synthetic construct
  source 1..19: mol_type = other RNA
atgtgtagcatatgttgct

SEQ ID NO: 310 - RNA, 19 nt, synthetic construct
  source 1..19: mol_type = other RNA
tgtgtagcatatgttgcta

SEQ ID NO: 311 - RNA, 19 nt, synthetic construct
  source 1..19: mol_type = other RNA
gtgtagcatatgttgctac

SEQ ID NO: 312 - RNA, 19 nt, synthetic construct
  source 1..19: mol_type = other RNA
tgtagcatatgttgctacc

SEQ ID NO: 313 - RNA, 19 nt, synthetic construct
  source 1..19: mol_type = other RNA
gtagcatatgttgctacca

SEQ ID NO: 314 - RNA, 19 nt, synthetic construct
  source 1..19: mol_type = other RNA
tagcatatgttgctaccag

SEQ ID NO: 315 - RNA, 19 nt, synthetic construct
  source 1..19: mol_type = other RNA
agcatatgttgctaccaga

SEQ ID NO: 316 - RNA, 19 nt, synthetic construct
  source 1..19: mol_type = other RNA
gcatatgttgctaccagag

SEQ ID NO: 317 - RNA, 19 nt, synthetic construct
  source 1..19: mol_type = other RNA
catatgttgctaccagaga

SEQ ID NO: 318 - RNA, 19 nt, synthetic construct
  source 1..19: mol_type = other RNA
atatgttgctaccagagac

SEQ ID NO: 319 - RNA, 19 nt, synthetic construct
  source 1..19: mol_type = other RNA
tatgttgctaccagagaca

SEQ ID NO: 320 - RNA, 19 nt, synthetic construct
  source 1..19: mol_type = other RNA
atgttgctaccagagacaa

SEQ ID NO: 321 - RNA, 19 nt, synthetic construct
  source 1..19: mol_type = other RNA
tgttgctaccagagacaac

SEQ ID NO: 322 - RNA, 19 nt, synthetic construct
  source 1..19: mol_type = other RNA
gttgctaccagagacaact

SEQ ID NO: 323 - RNA, 19 nt, synthetic construct
  source 1..19: mol_type = other RNA
ttgctaccagagacaactg

SEQ ID NO: 324 - RNA, 19 nt, synthetic construct
  source 1..19: mol_type = other RNA
tgctaccagagacaactgc

SEQ ID NO: 325 - RNA, 19 nt, synthetic construct
  source 1..19: mol_type = other RNA
gctaccagagacaactgct

SEQ ID NO: 326 - RNA, 19 nt, synthetic construct
  source 1..19: mol_type = other RNA
ctaccagagacaactgctg

SEQ ID NO: 327 - RNA, 19 nt, synthetic construct
  source 1..19: mol_type = other RNA
taccagagacaactgctgc

SEQ ID NO: 328 - RNA, 19 nt, synthetic construct
  source 1..19: mol_type = other RNA
accagagacaactgctgca

SEQ ID NO: 329 - RNA, 19 nt, synthetic construct
  source 1..19: mol_type = other RNA
ccagagacaactgctgcat

SEQ ID NO: 330 - RNA, 19 nt, synthetic construct
  source 1..19: mol_type = other RNA
cagagacaactgctgcatc

SEQ ID NO: 331 - RNA, 19 nt, synthetic construct
  source 1..19: mol_type = other RNA
agagacaactgctgcatct

SEQ ID NO: 332 - RNA, 19 nt, synthetic construct
  source 1..19: mol_type = other RNA
gagacaactgctgcatctt

SEQ ID NO: 333 - RNA, 19 nt, synthetic construct
  source 1..19: mol_type = other RNA
agacaactgctgcatctta

SEQ ID NO: 334 - RNA, 19 nt, synthetic construct
  source 1..19: mol_type = other RNA
gacaactgctgcatcttag

SEQ ID NO: 335 - RNA, 19 nt, synthetic construct
  source 1..19: mol_type = other RNA
acaactgctgcatcttaga

SEQ ID NO: 336 - RNA, 19 nt, synthetic construct
  source 1..19: mol_type = other RNA
caactgctgcatcttagat

SEQ ID NO: 337 - RNA, 19 nt, synthetic construct
  source 1..19: mol_type = other RNA
aactgctgcatcttagatg

SEQ ID NO: 338 - RNA, 19 nt, synthetic construct
  source 1..19: mol_type = other RNA
actgctgcatcttagatga

SEQ ID NO: 339 - RNA, 19 nt, synthetic construct
  source 1..19: mol_type = other RNA
ctgctgcatcttagatgaa

SEQ ID NO: 340 - RNA, 19 nt, synthetic construct
  source 1..19: mol_type = other RNA
tgctgcatcttagatgaaa

SEQ ID NO: 341 - RNA, 19 nt, synthetic construct
  source 1..19: mol_type = other RNA
gctgcatcttagatgaaag

SEQ ID NO: 342 - RNA, 19 nt, synthetic construct
  source 1..19: mol_type = other RNA
ctgcatcttagatgaaaga

SEQ ID NO: 343 - RNA, 19 nt, synthetic construct
  source 1..19: mol_type = other RNA
tgcatcttagatgaaagat

SEQ ID NO: 344 - RNA, 19 nt, synthetic construct
  source 1..19: mol_type = other RNA
gcatcttagatgaaagatt

SEQ ID NO: 345 - RNA, 19 nt, synthetic construct
  source 1..19: mol_type = other RNA
catcttagatgaaagattc

SEQ ID NO: 346 - RNA, 19 nt, synthetic construct
  source 1..19: mol_type = other RNA
atcttagatgaaagattcg

SEQ ID NO: 347 - RNA, 19 nt, synthetic construct
  source 1..19: mol_type = other RNA
tcttagatgaaagattcgg

SEQ ID NO: 348 - RNA, 19 nt, synthetic construct
  source 1..19: mol_type = other RNA
cttagatgaaagattcggt

SEQ ID NO: 349 - RNA, 19 nt, synthetic construct
  source 1..19: mol_type = other RNA
ttagatgaaagattcggta

SEQ ID NO: 350 - RNA, 19 nt, synthetic construct
  source 1..19: mol_type = other RNA
tagatgaaagattcggtag

SEQ ID NO: 351 - RNA, 19 nt, synthetic construct
  source 1..19: mol_type = other RNA
agatgaaagattcggtagt

SEQ ID NO: 352 - RNA, 19 nt, synthetic construct
  source 1..19: mol_type = other RNA
gatgaaagattcggtagtt

SEQ ID NO: 353 - RNA, 19 nt, synthetic construct
  source 1..19: mol_type = other RNA
atgaaagattcggtagtta

SEQ ID NO: 354 - RNA, 19 nt, synthetic construct
  source 1..19: mol_type = other RNA
tgaaagattcggtagttat

SEQ ID NO: 355 - RNA, 19 nt, synthetic construct
  source 1..19: mol_type = other RNA
gaaagattcggtagttatt

SEQ ID NO: 356 - RNA, 19 nt, synthetic construct
  source 1..19: mol_type = other RNA
aaagattcggtagttattg

SEQ ID NO: 357 - RNA, 19 nt, synthetic construct
  source 1..19: mol_type = other RNA
aagattcggtagttattgt

SEQ ID NO: 358 - RNA, 19 nt, synthetic construct
  source 1..19: mol_type = other RNA
agattcggtagttattgtc

SEQ ID NO: 359 - RNA, 19 nt, synthetic construct
  source 1..19: mol_type = other RNA
gattcggtagttattgtcc

SEQ ID NO: 360 - RNA, 19 nt, synthetic construct
  source 1..19: mol_type = other RNA
attcggtagttattgtcca

SEQ ID NO: 361 - RNA, 19 nt, synthetic construct
  source 1..19: mol_type = other RNA
ttcggtagttattgtccaa

SEQ ID NO: 362 - RNA, 19 nt, synthetic construct
  source 1..19: mol_type = other RNA
tcggtagttattgtccaac

SEQ ID NO: 363 - RNA, 19 nt, synthetic construct
  source 1..19: mol_type = other RNA
cggtagttattgtccaact

SEQ ID NO: 364 - RNA, 19 nt, synthetic construct
  source 1..19: mol_type = other RNA
ggtagttattgtccaacta

SEQ ID NO: 365 - RNA, 19 nt, synthetic construct
  source 1..19: mol_type = other RNA
gtagttattgtccaactac

SEQ ID NO: 366 - RNA, 19 nt, synthetic construct
  source 1..19: mol_type = other RNA
tagttattgtccaactacc

SEQ ID NO: 367 - RNA, 19 nt, synthetic construct
  source 1..19: mol_type = other RNA
agttattgtccaactacct

SEQ ID NO: 368 - RNA, 19 nt, synthetic construct
  source 1..19: mol_type = other RNA
gttattgtccaactacctg

SEQ ID NO: 369 - RNA, 19 nt, synthetic construct
  source 1..19: mol_type = other RNA
ttattgtccaactacctgt

SEQ ID NO: 370 - RNA, 19 nt, synthetic construct
  source 1..19: mol_type = other RNA
tattgtccaactacctgtg

SEQ ID NO: 371 - RNA, 19 nt, synthetic construct
  source 1..19: mol_type = other RNA
attgtccaactacctgtgg

SEQ ID NO: 372 - RNA, 19 nt, synthetic construct
  source 1..19: mol_type = other RNA
ttgtccaactacctgtggc

SEQ ID NO: 373 - RNA, 19 nt, synthetic construct
  source 1..19: mol_type = other RNA
tgtccaactacctgtggca

SEQ ID NO: 374 - RNA, 19 nt, synthetic construct
  source 1..19: mol_type = other RNA
gtccaactacctgtggcat

SEQ ID NO: 375 - RNA, 19 nt, synthetic construct
  source 1..19: mol_type = other RNA
tccaactacctgtggcatt

SEQ ID NO: 376 - RNA, 19 nt, synthetic construct
  source 1..19: mol_type = other RNA
ccaactacctgtggcattg

SEQ ID NO: 377 - RNA, 19 nt, synthetic construct
  source 1..19: mol_type = other RNA
caactacctgtggcattgc

SEQ ID NO: 378 - RNA, 19 nt, synthetic construct
  source 1..19: mol_type = other RNA
aactacctgtggcattgca

SEQ ID NO: 379 - RNA, 19 nt, synthetic construct
  source 1..19: mol_type = other RNA
actacctgtggcattgcag

SEQ ID NO: 380 - RNA, 19 nt, synthetic construct
  source 1..19: mol_type = other RNA
ctacctgtggcattgcaga

SEQ ID NO: 381 - RNA, 19 nt, synthetic construct
  source 1..19: mol_type = other RNA
tacctgtggcattgcagat

SEQ ID NO: 382 - RNA, 19 nt, synthetic construct
  source 1..19: mol_type = other RNA
acctgtggcattgcagatt

SEQ ID NO: 383 - RNA, 19 nt, synthetic construct
  source 1..19: mol_type = other RNA
cctgtggcattgcagattt

SEQ ID NO: 384 - RNA, 19 nt, synthetic construct
  source 1..19: mol_type = other RNA
ctgtggcattgcagatttc

SEQ ID NO: 385 - RNA, 19 nt, synthetic construct
  source 1..19: mol_type = other RNA
tgtggcattgcagatttcc

SEQ ID NO: 386 - RNA, 19 nt, synthetic construct
  source 1..19: mol_type = other RNA
gtggcattgcagatttcct

SEQ ID NO: 387 - RNA, 19 nt, synthetic construct
  source 1..19: mol_type = other RNA
tggcattgcagatttcctg

SEQ ID NO: 388 - RNA, 19 nt, synthetic construct
  source 1..19: mol_type = other RNA
ggcattgcagatttcctgt

SEQ ID NO: 389 - RNA, 19 nt, synthetic construct
  source 1..19: mol_type = other RNA
gcattgcagatttcctgtc

SEQ ID NO: 390 - RNA, 19 nt, synthetic construct
  source 1..19: mol_type = other RNA
cattgcagatttcctgtct

SEQ ID NO: 391 - RNA, 19 nt, synthetic construct
  source 1..19: mol_type = other RNA
attgcagatttcctgtcta

SEQ ID NO: 392 - RNA, 19 nt, synthetic construct
  source 1..19: mol_type = other RNA
ttgcagatttcctgtctac

SEQ ID NO: 393 - RNA, 19 nt, synthetic construct
  source 1..19: mol_type = other RNA
tgcagatttcctgtctact

SEQ ID NO: 394 - RNA, 19 nt, synthetic construct
  source 1..19: mol_type = other RNA
gcagatttcctgtctactt

SEQ ID NO: 395 - RNA, 19 nt, synthetic construct
  source 1..19: mol_type = other RNA
cagatttcctgtctactta

SEQ ID NO: 396 - RNA, 19 nt, synthetic construct
  source 1..19: mol_type = other RNA
agatttcctgtctacttat

SEQ ID NO: 397 - RNA, 19 nt, synthetic construct
  source 1..19: mol_type = other RNA
gatttcctgtctacttatc

SEQ ID NO: 398 - RNA, 19 nt, synthetic construct
  source 1..19: mol_type = other RNA
atttcctgtctacttatca

SEQ ID NO: 399 - RNA, 19 nt, synthetic construct
  source 1..19: mol_type = other RNA
tttcctgtctacttatcaa

SEQ ID NO: 400 - RNA, 19 nt, synthetic construct
  source 1..19: mol_type = other RNA
ttcctgtctacttatcaaa

SEQ ID NO: 401 - RNA, 19 nt, synthetic construct
  source 1..19: mol_type = other RNA
tcctgtctacttatcaaac

SEQ ID NO: 402 - RNA, 19 nt, synthetic construct
  source 1..19: mol_type = other RNA
cctgtctacttatcaaacc

SEQ ID NO: 403 - RNA, 19 nt, synthetic construct
  source 1..19: mol_type = other RNA
ctgtctacttatcaaacca

SEQ ID NO: 404 - RNA, 19 nt, synthetic construct
  source 1..19: mol_type = other RNA
tgtctacttatcaaaccaa

SEQ ID NO: 405 - RNA, 19 nt, synthetic construct
  source 1..19: mol_type = other RNA
gtctacttatcaaaccaaa

SEQ ID NO: 406 - RNA, 19 nt, synthetic construct
  source 1..19: mol_type = other RNA
tctacttatcaaaccaaag

SEQ ID NO: 407 - RNA, 19 nt, synthetic construct
  source 1..19: mol_type = other RNA
ctacttatcaaaccaaagt

SEQ ID NO: 408 - RNA, 19 nt, synthetic construct
  source 1..19: mol_type = other RNA
tacttatcaaaccaaagta

SEQ ID NO: 409 - RNA, 19 nt, synthetic construct
  source 1..19: mol_type = other RNA
acttatcaaaccaaagtag

SEQ ID NO: 410 - RNA, 19 nt, synthetic construct
  source 1..19: mol_type = other RNA
cttatcaaaccaaagtaga

SEQ ID NO: 411 - RNA, 19 nt, synthetic construct
  source 1..19: mol_type = other RNA
ttatcaaaccaaagtagac

SEQ ID NO: 412 - RNA, 19 nt, synthetic construct
  source 1..19: mol_type = other RNA
tatcaaaccaaagtagaca

SEQ ID NO: 413 - RNA, 19 nt, synthetic construct
  source 1..19: mol_type = other RNA
atcaaaccaaagtagacaa

SEQ ID NO: 414 - RNA, 19 nt, synthetic construct
  source 1..19: mol_type = other RNA
tcaaaccaaagtagacaag

SEQ ID NO: 415 - RNA, 19 nt, synthetic construct
  source 1..19: mol_type = other RNA
caaaccaaagtagacaagg

SEQ ID NO: 416 - RNA, 19 nt, synthetic construct
  source 1..19: mol_type = other RNA
aaaccaaagtagacaagga

SEQ ID NO: 417 - RNA, 19 nt, synthetic construct
  source 1..19: mol_type = other RNA
aaccaaagtagacaaggat

SEQ ID NO: 418 - RNA, 19 nt, synthetic construct
  source 1..19: mol_type = other RNA
accaaagtagacaaggatc

SEQ ID NO: 419 - RNA, 19 nt, synthetic construct
  source 1..19: mol_type = other RNA
ccaaagtagacaaggatct

SEQ ID NO: 420 - RNA, 19 nt, synthetic construct
  source 1..19: mol_type = other RNA
caaagtagacaaggatcta

SEQ ID NO: 421 - RNA, 19 nt, synthetic construct
  source 1..19: mol_type = other RNA
aaagtagacaaggatctac

SEQ ID NO: 422 - RNA, 19 nt, synthetic construct
  source 1..19: mol_type = other RNA
aagtagacaaggatctaca

SEQ ID NO: 423 - RNA, 19 nt, synthetic construct
  source 1..19: mol_type = other RNA
agtagacaaggatctacag

SEQ ID NO: 424 - RNA, 19 nt, synthetic construct
  source 1..19: mol_type = other RNA
gtagacaaggatctacagt

SEQ ID NO: 425 - RNA, 19 nt, synthetic construct
  source 1..19: mol_type = other RNA
tagacaaggatctacagtc

SEQ ID NO: 426 - RNA, 19 nt, synthetic construct
  source 1..19: mol_type = other RNA
agacaaggatctacagtct

SEQ ID NO: 427 - RNA, 19 nt, synthetic construct
  source 1..19: mol_type = other RNA
gacaaggatctacagtctt

SEQ ID NO: 428 - RNA, 19 nt, synthetic construct
  source 1..19: mol_type = other RNA
acaaggatctacagtcttt

SEQ ID NO: 429 - RNA, 19 nt, synthetic construct
  source 1..19: mol_type = other RNA
caaggatctacagtctttg

SEQ ID NO: 430 - RNA, 19 nt, synthetic construct
  source 1..19: mol_type = other RNA
aaggatctacagtctttgg

SEQ ID NO: 431 - RNA, 19 nt, synthetic construct
  source 1..19: mol_type = other RNA
aggatctacagtctttgga

SEQ ID NO: 432 - RNA, 19 nt, synthetic construct
  source 1..19: mol_type = other RNA
ggatctacagtctttggaa

SEQ ID NO: 433 - RNA, 19 nt, synthetic construct
  source 1..19: mol_type = other RNA
gatctacagtctttggaag

SEQ ID NO: 434 - RNA, 19 nt, synthetic construct
  source 1..19: mol_type = other RNA
atctacagtctttggaaga

SEQ ID NO: 435 - RNA, 19 nt, synthetic construct
  source 1..19: mol_type = other RNA
tctacagtctttggaagac

SEQ ID NO: 436 - RNA, 19 nt, synthetic construct
  source 1..19: mol_type = other RNA
ctacagtctttggaagaca

SEQ ID NO: 437 - RNA, 19 nt, synthetic construct
  source 1..19: mol_type = other RNA
tacagtctttggaagacat

SEQ ID NO: 438 - RNA, 19 nt, synthetic construct
  source 1..19: mol_type = other RNA
acagtctttggaagacatc

SEQ ID NO: 439 - RNA, 19 nt, synthetic construct
  source 1..19: mol_type = other RNA
cagtctttggaagacatct

SEQ ID NO: 440 - RNA, 19 nt, synthetic construct
  source 1..19: mol_type = other RNA
agtctttggaagacatctt

SEQ ID NO: 441 - RNA, 19 nt, synthetic construct
  source 1..19: mol_type = other RNA
gtctttggaagacatctta

SEQ ID NO: 442 - RNA, 19 nt, synthetic construct
  source 1..19: mol_type = other RNA
tctttggaagacatcttac

SEQ ID NO: 443 - RNA, 19 nt, synthetic construct
  source 1..19: mol_type = other RNA
ctttggaagacatcttaca

SEQ ID NO: 444 - RNA, 19 nt, synthetic construct
  source 1..19: mol_type = other RNA
tttggaagacatcttacat

SEQ ID NO: 445 - RNA, 19 nt, synthetic construct
  source 1..19: mol_type = other RNA
ttggaagacatcttacatc

SEQ ID NO: 446 - RNA, 19 nt, synthetic construct
  source 1..19: mol_type = other RNA
tggaagacatcttacatca

SEQ ID NO: 447 - RNA, 19 nt, synthetic construct
  source 1..19: mol_type = other RNA
ggaagacatcttacatcaa

SEQ ID NO: 448 - RNA, 19 nt, synthetic construct
  source 1..19: mol_type = other RNA
gaagacatcttacatcaag

SEQ ID NO: 449 - RNA, 19 nt, synthetic construct
  source 1..19: mol_type = other RNA
aagacatcttacatcaagt

SEQ ID NO: 450 - RNA, 19 nt, synthetic construct
  source 1..19: mol_type = other RNA
agacatcttacatcaagtt

SEQ ID NO: 451 - RNA, 19 nt, synthetic construct
  source 1..19: mol_type = other RNA
gacatcttacatcaagttg

SEQ ID NO: 452 - RNA, 19 nt, synthetic construct
  source 1..19: mol_type = other RNA
acatcttacatcaagttga

SEQ ID NO: 453 - RNA, 19 nt, synthetic construct
  source 1..19: mol_type = other RNA
catcttacatcaagttgaa

SEQ ID NO: 454 - RNA, 19 nt, synthetic construct
  source 1..19: mol_type = other RNA
atcttacatcaagttgaaa

SEQ ID NO: 455 - RNA, 19 nt, synthetic construct
  source 1..19: mol_type = other RNA
tcttacatcaagttgaaaa

SEQ ID NO: 456 - RNA, 19 nt, synthetic construct
  source 1..19: mol_type = other RNA
cttacatcaagttgaaaac

SEQ ID NO: 457 - RNA, 19 nt, synthetic construct
  source 1..19: mol_type = other RNA
ttacatcaagttgaaaaca

SEQ ID NO: 458 - RNA, 19 nt, synthetic construct
  source 1..19: mol_type = other RNA
tacatcaagttgaaaacaa

SEQ ID NO: 459 - RNA, 19 nt, synthetic construct
  source 1..19: mol_type = other RNA
acatcaagttgaaaacaaa

SEQ ID NO: 460 - RNA, 19 nt, synthetic construct
  source 1..19: mol_type = other RNA
catcaagttgaaaacaaaa

SEQ ID NO: 461 - RNA, 19 nt, synthetic construct
  source 1..19: mol_type = other RNA
atcaagttgaaaacaaaac

SEQ ID NO: 462 - RNA, 19 nt, synthetic construct
  source 1..19: mol_type = other RNA
tcaagttgaaaacaaaaca

SEQ ID NO: 463 - RNA, 19 nt, synthetic construct
  source 1..19: mol_type = other RNA
caagttgaaaacaaaacat

SEQ ID NO: 464 - RNA, 19 nt, synthetic construct
  source 1..19: mol_type = other RNA
aagttgaaaacaaaacatc

SEQ ID NO: 465 - RNA, 19 nt, synthetic construct
  source 1..19: mol_type = other RNA
agttgaaaacaaaacatca

SEQ ID NO: 466 - RNA, 19 nt, synthetic construct
  source 1..19: mol_type = other RNA
gttgaaaacaaaacatcag

SEQ ID NO: 467 - RNA, 19 nt, synthetic construct
  source 1..19: mol_type = other RNA
ttgaaaacaaaacatcaga

SEQ ID NO: 468 - RNA, 19 nt, synthetic construct
  source 1..19: mol_type = other RNA
tgaaaacaaaacatcagaa

SEQ ID NO: 469 - RNA, 19 nt, synthetic construct
  source 1..19: mol_type = other RNA
gaaaacaaaacatcagaag

SEQ ID NO: 470 - RNA, 19 nt, synthetic construct
  source 1..19: mol_type = other RNA
aaaacaaaacatcagaagt

SEQ ID NO: 471 - RNA, 19 nt, synthetic construct
  source 1..19: mol_type = other RNA
aaacaaaacatcagaagtc

SEQ ID NO: 472 - RNA, 19 nt, synthetic construct
  source 1..19: mol_type = other RNA
aacaaaacatcagaagtca

SEQ ID NO: 473 - RNA, 19 nt, synthetic construct
  source 1..19: mol_type = other RNA
acaaaacatcagaagtcaa

SEQ ID NO: 474 - RNA, 19 nt, synthetic construct
  source 1..19: mol_type = other RNA
caaaacatcagaagtcaaa

SEQ ID NO: 475 - RNA, 19 nt, synthetic construct
  source 1..19: mol_type = other RNA
aaaacatcagaagtcaaac

SEQ ID NO: 476 - RNA, 19 nt, synthetic construct
  source 1..19: mol_type = other RNA
aaacatcagaagtcaaaca

SEQ ID NO: 477 - RNA, 19 nt, synthetic construct
  source 1..19: mol_type = other RNA
aacatcagaagtcaaacag

SEQ ID NO: 478 - RNA, 19 nt, synthetic construct
  source 1..19: mol_type = other RNA
acatcagaagtcaaacagc

SEQ ID NO: 479 - RNA, 19 nt, synthetic construct
  source 1..19: mol_type = other RNA
catcagaagtcaaacagct

SEQ ID NO: 480 - RNA, 19 nt, synthetic construct
  source 1..19: mol_type = other RNA
atcagaagtcaaacagctg

SEQ ID NO: 481 - RNA, 19 nt, synthetic construct
  source 1..19: mol_type = other RNA
tcagaagtcaaacagctga

SEQ ID NO: 482 - RNA, 19 nt, synthetic construct
  source 1..19: mol_type = other RNA
cagaagtcaaacagctgat

SEQ ID NO: 483 - RNA, 19 nt, synthetic construct
  source 1..19: mol_type = other RNA
agaagtcaaacagctgata

SEQ ID NO: 484 - RNA, 19 nt, synthetic construct
  source 1..19: mol_type = other RNA
gaagtcaaacagctgataa

SEQ ID NO: 485 - RNA, 19 nt, synthetic construct
  source 1..19: mol_type = other RNA
aagtcaaacagctgataaa

SEQ ID NO: 486 - RNA, 19 nt, synthetic construct
  source 1..19: mol_type = other RNA
agtcaaacagctgataaaa

SEQ ID NO: 487 - RNA, 19 nt, synthetic construct
  source 1..19: mol_type = other RNA
gtcaaacagctgataaaag

SEQ ID NO: 488 - RNA, 19 nt, synthetic construct
  source 1..19: mol_type = other RNA
tcaaacagctgataaaagc

SEQ ID NO: 489 - RNA, 19 nt, synthetic construct
  source 1..19: mol_type = other RNA
caaacagctgataaaagca

SEQ ID NO: 490 - RNA, 19 nt, synthetic construct
  source 1..19: mol_type = other RNA
aaacagctgataaaagcaa

SEQ ID NO: 491 - RNA, 19 nt, synthetic construct
  source 1..19: mol_type = other RNA
aacagctgataaaagcaat

SEQ ID NO: 492 - RNA, 19 nt, synthetic construct
  source 1..19: mol_type = other RNA
acagctgataaaagcaatc

SEQ ID NO: 493 - RNA, 19 nt, synthetic construct
  source 1..19: mol_type = other RNA
cagctgataaaagcaatcc

SEQ ID NO: 494 - RNA, 19 nt, synthetic construct
  source 1..19: mol_type = other RNA
agctgataaaagcaatcca

SEQ ID NO: 495 - RNA, 19 nt, synthetic construct
  source 1..19: mol_type = other RNA
gctgataaaagcaatccaa

SEQ ID NO: 496 - RNA, 19 nt, synthetic construct
  source 1..19: mol_type = other RNA
ctgataaaagcaatccaac

SEQ ID NO: 497 - RNA, 19 nt, synthetic construct
  source 1..19: mol_type = other RNA
tgataaaagcaatccaact

SEQ ID NO: 498 - RNA, 19 nt, synthetic construct
  source 1..19: mol_type = other RNA
gataaaagcaatccaactc

SEQ ID NO: 499 - RNA, 19 nt, synthetic construct
  source 1..19: mol_type = other RNA
ataaaagcaatccaactca

SEQ ID NO: 500 - RNA, 19 nt, synthetic construct
  source 1..19: mol_type = other RNA
taaaagcaatccaactcac

SEQ ID NO: 501 - RNA, 19 nt, synthetic construct
  source 1..19: mol_type = other RNA
aaaagcaatccaactcact

SEQ ID NO: 502 - RNA, 19 nt, synthetic construct
  source 1..19: mol_type = other RNA
aaagcaatccaactcactt

SEQ ID NO: 503 - RNA, 19 nt, synthetic construct
  source 1..19: mol_type = other RNA
aagcaatccaactcactta

SEQ ID NO: 504 - RNA, 19 nt, synthetic construct
  source 1..19: mol_type = other RNA
agcaatccaactcacttat

SEQ ID NO: 505 - RNA, 19 nt, synthetic construct
  source 1..19: mol_type = other RNA
gcaatccaactcacttata

SEQ ID NO: 506 - RNA, 19 nt, synthetic construct
  source 1..19: mol_type = other RNA
caatccaactcacttataa

SEQ ID NO: 507 - RNA, 19 nt, synthetic construct
  source 1..19: mol_type = other RNA
aatccaactcacttataat

SEQ ID NO: 508 - RNA, 19 nt, synthetic construct
  source 1..19: mol_type = other RNA
atccaactcacttataatc

SEQ ID NO: 509 - RNA, 19 nt, synthetic construct
  source 1..19: mol_type = other RNA
tccaactcacttataatcc

SEQ ID NO: 510 - RNA, 19 nt, synthetic construct
  source 1..19: mol_type = other RNA
ccaactcacttataatcct

SEQ ID NO: 511 - RNA, 19 nt, synthetic construct
  source 1..19: mol_type = other RNA
caactcacttataatcctg

SEQ ID NO: 512 - RNA, 19 nt, synthetic construct
  source 1..19: mol_type = other RNA
aactcacttataatcctga

SEQ ID NO: 513 - RNA, 19 nt, synthetic construct
  source 1..19: mol_type = other RNA
actcacttataatcctgat

SEQ ID NO: 514 - RNA, 19 nt, synthetic construct
  source 1..19: mol_type = other RNA
ctcacttataatcctgatg

SEQ ID NO: 515 - RNA, 19 nt, synthetic construct
  source 1..19: mol_type = other RNA
tcacttataatcctgatga

SEQ ID NO: 516 - RNA, 19 nt, synthetic construct
  source 1..19: mol_type = other RNA
cacttataatcctgatgaa

SEQ ID NO: 517 - RNA, 19 nt, synthetic construct
  source 1..19: mol_type = other RNA
acttataatcctgatgaat

SEQ ID NO: 518 - protein, 19 aa, synthetic construct
CTTATAATCCTGATGAATC

SEQ ID NO: 519 - RNA, 19 nt, synthetic construct
  source 1..19: mol_type = other RNA
ttataatcctgatgaatca

SEQ ID NO: 520 - RNA, 19 nt, synthetic construct
  source 1..19: mol_type = other RNA
tataatcctgatgaatcat

SEQ ID NO: 521 - RNA, 19 nt, synthetic construct
  source 1..19: mol_type = other RNA
ataatcctgatgaatcatc

SEQ ID NO: 522 - RNA, 19 nt, synthetic construct
  source 1..19: mol_type = other RNA
taatcctgatgaatcatca

SEQ ID NO: 523 - RNA, 19 nt, synthetic construct
  source 1..19: mol_type = other RNA
aatcctgatgaatcatcaa

SEQ ID NO: 524 - RNA, 19 nt, synthetic construct
  source 1..19: mol_type = other RNA
atcctgatgaatcatcaaa

SEQ ID NO: 525 - RNA, 19 nt, synthetic construct
  source 1..19: mol_type = other RNA
tcctgatgaatcatcaaaa

SEQ ID NO: 526 - RNA, 19 nt, synthetic construct
  source 1..19: mol_type = other RNA
cctgatgaatcatcaaaac

SEQ ID NO: 527 - RNA, 19 nt, synthetic construct
  source 1..19: mol_type = other RNA
ctgatgaatcatcaaaacc

SEQ ID NO: 528 - RNA, 19 nt, synthetic construct
  source 1..19: mol_type = other RNA
tgatgaatcatcaaaacca

SEQ ID NO: 529 - RNA, 19 nt, synthetic construct
  source 1..19: mol_type = other RNA
gatgaatcatcaaaaccaa

SEQ ID NO: 530 - RNA, 19 nt, synthetic construct
  source 1..19: mol_type = other RNA
atgaatcatcaaaaccaaa

SEQ ID NO: 531 - RNA, 19 nt, synthetic construct
  source 1..19: mol_type = other RNA
tgaatcatcaaaaccaaat

SEQ ID NO: 532 - RNA, 19 nt, synthetic construct
  source 1..19: mol_type = other RNA
gaatcatcaaaaccaaata

SEQ ID NO: 533 - RNA, 19 nt, synthetic construct
  source 1..19: mol_type = other RNA
aatcatcaaaaccaaatat

SEQ ID NO: 534 - RNA, 19 nt, synthetic construct
  source 1..19: mol_type = other RNA
atcatcaaaaccaaatatg

SEQ ID NO: 535 - RNA, 19 nt, synthetic construct
  source 1..19: mol_type = other RNA
tcatcaaaaccaaatatga

SEQ ID NO: 536 - RNA, 19 nt, synthetic construct
  source 1..19: mol_type = other RNA
catcaaaaccaaatatgat

SEQ ID NO: 537 - RNA, 19 nt, synthetic construct
  source 1..19: mol_type = other RNA
atcaaaaccaaatatgata

SEQ ID NO: 538 - RNA, 19 nt, synthetic construct
  source 1..19: mol_type = other RNA
tcaaaaccaaatatgatag

SEQ ID NO: 539 - RNA, 19 nt, synthetic construct
  source 1..19: mol_type = other RNA
caaaaccaaatatgataga

SEQ ID NO: 540 - RNA, 19 nt, synthetic construct
  source 1..19: mol_type = other RNA
aaaaccaaatatgatagac

SEQ ID NO: 541 - RNA, 19 nt, synthetic construct
  source 1..19: mol_type = other RNA
aaaccaaatatgatagacg

SEQ ID NO: 542 - RNA, 19 nt, synthetic construct
  source 1..19: mol_type = other RNA
aaccaaatatgatagacgc

SEQ ID NO: 543 - RNA, 19 nt, synthetic construct
  source 1..19: mol_type = other RNA
accaaatatgatagacgct

SEQ ID NO: 544 - RNA, 19 nt, synthetic construct
  source 1..19: mol_type = other RNA
ccaaatatgatagacgctg

SEQ ID NO: 545 - RNA, 19 nt, synthetic construct
  source 1..19: mol_type = other RNA
caaatatgatagacgctgc

SEQ ID NO: 546 - RNA, 19 nt, synthetic construct
  source 1..19: mol_type = other RNA
aaatatgatagacgctgct

SEQ ID NO: 547 - RNA, 19 nt, synthetic construct
  source 1..19: mol_type = other RNA
aatatgatagacgctgcta

SEQ ID NO: 548 - RNA, 19 nt, synthetic construct
  source 1..19: mol_type = other RNA
atatgatagacgctgctac

SEQ ID NO: 549 - RNA, 19 nt, synthetic construct
  source 1..19: mol_type = other RNA
tatgatagacgctgctact

SEQ ID NO: 550 - RNA, 19 nt, synthetic construct
  source 1..19: mol_type = other RNA
atgatagacgctgctactt

SEQ ID NO: 551 - RNA, 19 nt, synthetic construct
  source 1..19: mol_type = other RNA
tgatagacgctgctacttt

SEQ ID NO: 552 - RNA, 19 nt, synthetic construct
  source 1..19: mol_type = other RNA
gatagacgctgctactttg

SEQ ID NO: 553 - RNA, 19 nt, synthetic construct
  source 1..19: mol_type = other RNA
atagacgctgctactttga

SEQ ID NO: 554 - RNA, 19 nt, synthetic construct
  source 1..19: mol_type = other RNA
tagacgctgctactttgaa

SEQ ID NO: 555 - RNA, 19 nt, synthetic construct
  source 1..19: mol_type = other RNA
agacgctgctactttgaag

SEQ ID NO: 556 - RNA, 19 nt, synthetic construct
  source 1..19: mol_type = other RNA
gacgctgctactttgaagt

SEQ ID NO: 557 - RNA, 19 nt, synthetic construct
  source 1..19: mol_type = other RNA
acgctgctactttgaagtc

SEQ ID NO: 558 - RNA, 19 nt, synthetic construct
  source 1..19: mol_type = other RNA
cgctgctactttgaagtcc

SEQ ID NO: 559 - RNA, 19 nt, synthetic construct
  source 1..19: mol_type = other RNA
gctgctactttgaagtcca

SEQ ID NO: 560 - RNA, 19 nt, synthetic construct
  source 1..19: mol_type = other RNA
ctgctactttgaagtccag

SEQ ID NO: 561 - RNA, 19 nt, synthetic construct
  source 1..19: mol_type = other RNA
tgctactttgaagtccagg

SEQ ID NO: 562 - RNA, 19 nt, synthetic construct
  source 1..19: mol_type = other RNA
gctactttgaagtccagga

SEQ ID NO: 563 - RNA, 19 nt, synthetic construct
  source 1..19: mol_type = other RNA
ctactttgaagtccaggaa

SEQ ID NO: 564 - RNA, 19 nt, synthetic construct
  source 1..19: mol_type = other RNA
tactttgaagtccaggaaa

SEQ ID NO: 565 - RNA, 19 nt, synthetic construct
  source 1..19: mol_type = other RNA
actttgaagtccaggaaaa

SEQ ID NO: 566 - RNA, 19 nt, synthetic construct
  source 1..19: mol_type = other RNA
ctttgaagtccaggaaaat

SEQ ID NO: 567 - RNA, 19 nt, synthetic construct
  source 1..19: mol_type = other RNA
tttgaagtccaggaaaatg

SEQ ID NO: 568 - RNA, 19 nt, synthetic construct
  source 1..19: mol_type = other RNA
ttgaagtccaggaaaatgt

SEQ ID NO: 569 - RNA, 19 nt, synthetic construct
  source 1..19: mol_type = other RNA
tgaagtccaggaaaatgtt

SEQ ID NO: 570 - RNA, 19 nt, synthetic construct
  source 1..19: mol_type = other RNA
gaagtccaggaaaatgtta

SEQ ID NO: 571 - RNA, 19 nt, synthetic construct
  source 1..19: mol_type = other RNA
aagtccaggaaaatgttag

SEQ ID NO: 572 - RNA, 19 nt, synthetic construct
  source 1..19: mol_type = other RNA
agtccaggaaaatgttaga

SEQ ID NO: 573 - RNA, 19 nt, synthetic construct
  source 1..19: mol_type = other RNA
gtccaggaaaatgttagaa

SEQ ID NO: 574 - RNA, 19 nt, synthetic construct
  source 1..19: mol_type = other RNA
tccaggaaaatgttagaag

SEQ ID NO: 575 - RNA, 19 nt, synthetic construct
  source 1..19: mol_type = other RNA
ccaggaaaatgttagaaga

SEQ ID NO: 576 - RNA, 19 nt, synthetic construct
  source 1..19: mol_type = other RNA
caggaaaatgttagaagaa

SEQ ID NO: 577 - RNA, 19 nt, synthetic construct
  source 1..19: mol_type = other RNA
aggaaaatgttagaagaaa

SEQ ID NO: 578 - RNA, 19 nt, synthetic construct
  source 1..19: mol_type = other RNA
ggaaaatgttagaagaaat

SEQ ID NO: 579 - RNA, 19 nt, synthetic construct
  source 1..19: mol_type = other RNA
gaaaatgttagaagaaatt

SEQ ID NO: 580 - RNA, 19 nt, synthetic construct
  source 1..19: mol_type = other RNA
aaaatgttagaagaaatta

SEQ ID NO: 581 - RNA, 19 nt, synthetic construct
  source 1..19: mol_type = other RNA
aaatgttagaagaaattat

SEQ ID NO: 582 - RNA, 19 nt, synthetic construct
  source 1..19: mol_type = other RNA
aatgttagaagaaattatg

SEQ ID NO: 583 - RNA, 19 nt, synthetic construct
  source 1..19: mol_type = other RNA
atgttagaagaaattatga

SEQ ID NO: 584 - RNA, 19 nt, synthetic construct
  source 1..19: mol_type = other RNA
tgttagaagaaattatgaa

SEQ ID NO: 585 - RNA, 19 nt, synthetic construct
  source 1..19: mol_type = other RNA
gttagaagaaattatgaaa

SEQ ID NO: 586 - RNA, 19 nt, synthetic construct
  source 1..19: mol_type = other RNA
ttagaagaaattatgaaat

SEQ ID NO: 587 - RNA, 19 nt, synthetic construct
  source 1..19: mol_type = other RNA
tagaagaaattatgaaata

SEQ ID NO: 588 - RNA, 19 nt, synthetic construct
  source 1..19: mol_type = other RNA
agaagaaattatgaaatat

SEQ ID NO: 589 - RNA, 19 nt, synthetic construct
  source 1..19: mol_type = other RNA
gaagaaattatgaaatatg

SEQ ID NO: 590 - RNA, 19 nt, synthetic construct
  source 1..19: mol_type = other RNA
aagaaattatgaaatatga

SEQ ID NO: 591 - RNA, 19 nt, synthetic construct
  source 1..19: mol_type = other RNA
agaaattatgaaatatgaa

SEQ ID NO: 592 - RNA, 19 nt, synthetic construct
  source 1..19: mol_type = other RNA
gaaattatgaaatatgaag

SEQ ID NO: 593 - RNA, 19 nt, synthetic construct
  source 1..19: mol_type = other RNA
aaattatgaaatatgaagc

SEQ ID NO: 594 - RNA, 19 nt, synthetic construct
  source 1..19: mol_type = other RNA
aattatgaaatatgaagca

SEQ ID NO: 595 - RNA, 19 nt, synthetic construct
  source 1..19: mol_type = other RNA
attatgaaatatgaagcat

SEQ ID NO: 596 - RNA, 19 nt, synthetic construct
  source 1..19: mol_type = other RNA
ttatgaaatatgaagcatc

SEQ ID NO: 597 - RNA, 19 nt, synthetic construct
  source 1..19: mol_type = other RNA
tatgaaatatgaagcatcg

SEQ ID NO: 598 - RNA, 19 nt, synthetic construct
  source 1..19: mol_type = other RNA
atgaaatatgaagcatcga

SEQ ID NO: 599 - RNA, 19 nt, synthetic construct
  source 1..19: mol_type = other RNA
tgaaatatgaagcatcgat

SEQ ID NO: 600 - RNA, 19 nt, synthetic construct
  source 1..19: mol_type = other RNA
gaaatatgaagcatcgatt

SEQ ID NO: 601 - RNA, 19 nt, synthetic construct
  source 1..19: mol_type = other RNA
aaatatgaagcatcgattt

SEQ ID NO: 602 - RNA, 19 nt, synthetic construct
  source 1..19: mol_type = other RNA
aatatgaagcatcgatttt

SEQ ID NO: 603 - RNA, 19 nt, synthetic construct
  source 1..19: mol_type = other RNA
atatgaagcatcgatttta

SEQ ID NO: 604 - RNA, 19 nt, synthetic construct
  source 1..19: mol_type = other RNA
tatgaagcatcgattttaa

SEQ ID NO: 605 - RNA, 19 nt, synthetic construct
  source 1..19: mol_type = other RNA
atgaagcatcgattttaac

SEQ ID NO: 606 - RNA, 19 nt, synthetic construct
  source 1..19: mol_type = other RNA
tgaagcatcgattttaaca

SEQ ID NO: 607 - RNA, 19 nt, synthetic construct
  source 1..19: mol_type = other RNA
gaagcatcgattttaacac

SEQ ID NO: 608 - RNA, 19 nt, synthetic construct
  source 1..19: mol_type = other RNA
aagcatcgattttaacaca

SEQ ID NO: 609 - RNA, 19 nt, synthetic construct
  source 1..19: mol_type = other RNA
agcatcgattttaacacat

SEQ ID NO: 610 - RNA, 19 nt, synthetic construct
  source 1..19: mol_type = other RNA
gcatcgattttaacacatg

SEQ ID NO: 611 - RNA, 19 nt, synthetic construct
  source 1..19: mol_type = other RNA
catcgattttaacacatga

SEQ ID NO: 612 - RNA, 19 nt, synthetic construct
  source 1..19: mol_type = other RNA
atcgattttaacacatgac

SEQ ID NO: 613 - RNA, 19 nt, synthetic construct
  source 1..19: mol_type = other RNA
tcgattttaacacatgact

SEQ ID NO: 614 - RNA, 19 nt, synthetic construct
  source 1..19: mol_type = other RNA
cgattttaacacatgactc

SEQ ID NO: 615 - RNA, 19 nt, synthetic construct
  source 1..19: mol_type = other RNA
gattttaacacatgactca

SEQ ID NO: 616 - RNA, 19 nt, synthetic construct
  source 1..19: mol_type = other RNA
attttaacacatgactcaa

SEQ ID NO: 617 - RNA, 19 nt, synthetic construct
  source 1..19: mol_type = other RNA
ttttaacacatgactcaag

SEQ ID NO: 618 - RNA, 19 nt, synthetic construct
  source 1..19: mol_type = other RNA
tttaacacatgactcaagt

SEQ ID NO: 619 - RNA, 19 nt, synthetic construct
  source 1..19: mol_type = other RNA
ttaacacatgactcaagta

SEQ ID NO: 620 - RNA, 19 nt, synthetic construct
  source 1..19: mol_type = other RNA
taacacatgactcaagtat

SEQ ID NO: 621 - RNA, 19 nt, synthetic construct
  source 1..19: mol_type = other RNA
aacacatgactcaagtatt

SEQ ID NO: 622 - RNA, 19 nt, synthetic construct
  source 1..19: mol_type = other RNA
acacatgactcaagtattc

SEQ ID NO: 623 - RNA, 19 nt, synthetic construct
  source 1..19: mol_type = other RNA
cacatgactcaagtattcg

SEQ ID NO: 624 - RNA, 19 nt, synthetic construct
  source 1..19: mol_type = other RNA
acatgactcaagtattcga

SEQ ID NO: 625 - RNA, 19 nt, synthetic construct
  source 1..19: mol_type = other RNA
catgactcaagtattcgat

SEQ ID NO: 626 - RNA, 19 nt, synthetic construct
  source 1..19: mol_type = other RNA
atgactcaagtattcgata

SEQ ID NO: 627 - RNA, 19 nt, synthetic construct
  source 1..19: mol_type = other RNA
tgactcaagtattcgatat

SEQ ID NO: 628 - RNA, 19 nt, synthetic construct
  source 1..19: mol_type = other RNA
gactcaagtattcgatatt

SEQ ID NO: 629 - RNA, 19 nt, synthetic construct
  source 1..19: mol_type = other RNA
actcaagtattcgatattt

SEQ ID NO: 630 - RNA, 19 nt, synthetic construct
  source 1..19: mol_type = other RNA
ctcaagtattcgatatttg

SEQ ID NO: 631 - RNA, 19 nt, synthetic construct
  source 1..19: mol_type = other RNA
tcaagtattcgatatttgc

SEQ ID NO: 632 - RNA, 19 nt, synthetic construct
  source 1..19: mol_type = other RNA
caagtattcgatatttgca

SEQ ID NO: 633 - RNA, 19 nt, synthetic construct
  source 1..19: mol_type = other RNA
aagtattcgatatttgcag

SEQ ID NO: 634 - RNA, 19 nt, synthetic construct
  source 1..19: mol_type = other RNA
agtattcgatatttgcagg

SEQ ID NO: 635 - RNA, 19 nt, synthetic construct
  source 1..19: mol_type = other RNA
gtattcgatatttgcagga

SEQ ID NO: 636 - RNA, 19 nt, synthetic construct
  source 1..19: mol_type = other RNA
tattcgatatttgcaggaa

SEQ ID NO: 637 - RNA, 19 nt, synthetic construct
  source 1..19: mol_type = other RNA
attcgatatttgcaggaaa

SEQ ID NO: 638 - RNA, 19 nt, synthetic construct
  source 1..19: mol_type = other RNA
ttcgatatttgcaggaaat

SEQ ID NO: 639 - RNA, 19 nt, synthetic construct
  source 1..19: mol_type = other RNA
tcgatatttgcaggaaata

SEQ ID NO: 640 - RNA, 19 nt, synthetic construct
  source 1..19: mol_type = other RNA
cgatatttgcaggaaatat

SEQ ID NO: 641 - RNA, 19 nt, synthetic construct
  source 1..19: mol_type = other RNA
gatatttgcaggaaatata

SEQ ID NO: 642 - RNA, 19 nt, synthetic construct
  source 1..19: mol_type = other RNA
atatttgcaggaaatatat

SEQ ID NO: 643 - RNA, 19 nt, synthetic construct
  source 1..19: mol_type = other RNA
tatttgcaggaaatatata

SEQ ID NO: 644 - RNA, 19 nt, synthetic construct
  source 1..19: mol_type = other RNA
atttgcaggaaatatataa

SEQ ID NO: 645 - RNA, 19 nt, synthetic construct
  source 1..19: mol_type = other RNA
tttgcaggaaatatataat

SEQ ID NO: 646 - RNA, 19 nt, synthetic construct
  source 1..19: mol_type = other RNA
ttgcaggaaatatataatt

SEQ ID NO: 647 - RNA, 19 nt, synthetic construct
  source 1..19: mol_type = other RNA
tgcaggaaatatataattc

SEQ ID NO: 648 - RNA, 19 nt, synthetic construct
  source 1..19: mol_type = other RNA
gcaggaaatatataattca

SEQ ID NO: 649 - RNA, 19 nt, synthetic construct
  source 1..19: mol_type = other RNA
caggaaatatataattcaa

SEQ ID NO: 650 - RNA, 19 nt, synthetic construct
  source 1..19: mol_type = other RNA
aggaaatatataattcaaa

SEQ ID NO: 651 - RNA, 19 nt, synthetic construct
  source 1..19: mol_type = other RNA
ggaaatatataattcaaat

SEQ ID NO: 652 - RNA, 19 nt, synthetic construct
  source 1..19: mol_type = other RNA
gaaatatataattcaaata

SEQ ID NO: 653 - RNA, 19 nt, synthetic construct
  source 1..19: mol_type = other RNA
aaatatataattcaaataa

SEQ ID NO: 654 - RNA, 19 nt, synthetic construct
  source 1..19: mol_type = other RNA
aatatataattcaaataat

SEQ ID NO: 655 - RNA, 19 nt, synthetic construct
  source 1..19: mol_type = other RNA
atatataattcaaataatc

SEQ ID NO: 656 - RNA, 19 nt, synthetic construct
  source 1..19: mol_type = other RNA
tatataattcaaataatca

SEQ ID NO: 657 - RNA, 19 nt, synthetic construct
  source 1..19: mol_type = other RNA
atataattcaaataatcaa

SEQ ID NO: 658 - RNA, 19 nt, synthetic construct
  source 1..19: mol_type = other RNA
tataattcaaataatcaaa

SEQ ID NO: 659 - RNA, 19 nt, synthetic construct
  source 1..19: mol_type = other RNA
ataattcaaataatcaaaa

SEQ ID NO: 660 - RNA, 19 nt, synthetic construct
  source 1..19: mol_type = other RNA
taattcaaataatcaaaag

SEQ ID NO: 661 - RNA, 19 nt, synthetic construct
  source 1..19: mol_type = other RNA
aattcaaataatcaaaaga

SEQ ID NO: 662 - RNA, 19 nt, synthetic construct
  source 1..19: mol_type = other RNA
attcaaataatcaaaagat

SEQ ID NO: 663 - RNA, 19 nt, synthetic construct
  source 1..19: mol_type = other RNA
ttcaaataatcaaaagatt

SEQ ID NO: 664 - RNA, 19 nt, synthetic construct
  source 1..19: mol_type = other RNA
tcaaataatcaaaagattg

SEQ ID NO: 665 - RNA, 19 nt, synthetic construct
  source 1..19: mol_type = other RNA
caaataatcaaaagattgt

SEQ ID NO: 666 - RNA, 19 nt, synthetic construct
  source 1..19: mol_type = other RNA
aaataatcaaaagattgtt

SEQ ID NO: 667 - RNA, 19 nt, synthetic construct
  source 1..19: mol_type = other RNA
aataatcaaaagattgtta

SEQ ID NO: 668 - RNA, 19 nt, synthetic construct
  source 1..19: mol_type = other RNA
ataatcaaaagattgttaa

SEQ ID NO: 669 - RNA, 19 nt, synthetic construct
  source 1..19: mol_type = other RNA
taatcaaaagattgttaac

SEQ ID NO: 670 - RNA, 19 nt, synthetic construct
  source 1..19: mol_type = other RNA
aatcaaaagattgttaacc

SEQ ID NO: 671 - RNA, 19 nt, synthetic construct
  source 1..19: mol_type = other RNA
atcaaaagattgttaacct

SEQ ID NO: 672 - RNA, 19 nt, synthetic construct
  source 1..19: mol_type = other RNA
tcaaaagattgttaacctg

SEQ ID NO: 673 - RNA, 19 nt, synthetic construct
  source 1..19: mol_type = other RNA
caaaagattgttaacctga

SEQ ID NO: 674 - RNA, 19 nt, synthetic construct
  source 1..19: mol_type = other RNA
aaaagattgttaacctgaa

SEQ ID NO: 675 - RNA, 19 nt, synthetic construct
  source 1..19: mol_type = other RNA
aaagattgttaacctgaaa

SEQ ID NO: 676 - RNA, 19 nt, synthetic construct
  source 1..19: mol_type = other RNA
aagattgttaacctgaaag

SEQ ID NO: 677 - RNA, 19 nt, synthetic construct
  source 1..19: mol_type = other RNA
agattgttaacctgaaaga

SEQ ID NO: 678 - RNA, 19 nt, synthetic construct
  source 1..19: mol_type = other RNA
gattgttaacctgaaagag

SEQ ID NO: 679 - RNA, 19 nt, synthetic construct
  source 1..19: mol_type = other RNA
attgttaacctgaaagaga

SEQ ID NO: 680 - RNA, 19 nt, synthetic construct
  source 1..19: mol_type = other RNA
ttgttaacctgaaagagaa

SEQ ID NO: 681 - RNA, 19 nt, synthetic construct
  source 1..19: mol_type = other RNA
tgttaacctgaaagagaag

SEQ ID NO: 682 - RNA, 19 nt, synthetic construct
  source 1..19: mol_type = other RNA
gttaacctgaaagagaagg

SEQ ID NO: 683 - RNA, 19 nt, synthetic construct
  source 1..19: mol_type = other RNA
ttaacctgaaagagaaggt

SEQ ID NO: 684 - RNA, 19 nt, synthetic construct
  source 1..19: mol_type = other RNA
taacctgaaagagaaggta

SEQ ID NO: 685 - RNA, 19 nt, synthetic construct
  source 1..19: mol_type = other RNA
aacctgaaagagaaggtag

SEQ ID NO: 686 - RNA, 19 nt, synthetic construct
  source 1..19: mol_type = other RNA
acctgaaagagaaggtagc

SEQ ID NO: 687 - RNA, 19 nt, synthetic construct
  source 1..19: mol_type = other RNA
cctgaaagagaaggtagcc

SEQ ID NO: 688 - RNA, 19 nt, synthetic construct
  source 1..19: mol_type = other RNA
ctgaaagagaaggtagccc

SEQ ID NO: 689 - RNA, 19 nt, synthetic construct
  source 1..19: mol_type = other RNA
tgaaagagaaggtagccca

SEQ ID NO: 690 - RNA, 19 nt, synthetic construct
  source 1..19: mol_type = other RNA
gaaagagaaggtagcccag

SEQ ID NO: 691 - RNA, 19 nt, synthetic construct
  source 1..19: mol_type = other RNA
aaagagaaggtagcccagc

SEQ ID NO: 692 - RNA, 19 nt, synthetic construct
  source 1..19: mol_type = other RNA
aagagaaggtagcccagct

SEQ ID NO: 693 - RNA, 19 nt, synthetic construct
  source 1..19: mol_type = other RNA
agagaaggtagcccagctt

SEQ ID NO: 694 - RNA, 19 nt, synthetic construct
  source 1..19: mol_type = other RNA
gagaaggtagcccagcttg

SEQ ID NO: 695 - RNA, 19 nt, synthetic construct
  source 1..19: mol_type = other RNA
agaaggtagcccagcttga

SEQ ID NO: 696 - RNA, 19 nt, synthetic construct
  source 1..19: mol_type = other RNA
gaaggtagcccagcttgaa

SEQ ID NO: 697 - RNA, 19 nt, synthetic construct
  source 1..19: mol_type = other RNA
aaggtagcccagcttgaag

SEQ ID NO: 698 - RNA, 19 nt, synthetic construct
  source 1..19: mol_type = other RNA
aggtagcccagcttgaagc

SEQ ID NO: 699 - RNA, 19 nt, synthetic construct
  source 1..19: mol_type = other RNA
ggtagcccagcttgaagca

SEQ ID NO: 700 - RNA, 19 nt, synthetic construct
  source 1..19: mol_type = other RNA
gtagcccagcttgaagcac

SEQ ID NO: 701 - RNA, 19 nt, synthetic construct
  source 1..19: mol_type = other RNA
tagcccagcttgaagcaca

SEQ ID NO: 702 - RNA, 19 nt, synthetic construct
  source 1..19: mol_type = other RNA
agcccagcttgaagcacag

SEQ ID NO: 703 - RNA, 19 nt, synthetic construct
  source 1..19: mol_type = other RNA
gcccagcttgaagcacagt

SEQ ID NO: 704 - RNA, 19 nt, synthetic construct
  source 1..19: mol_type = other RNA
cccagcttgaagcacagtg

SEQ ID NO: 705 - RNA, 19 nt, synthetic construct
  source 1..19: mol_type = other RNA
ccagcttgaagcacagtgc

SEQ ID NO: 706 - RNA, 19 nt, synthetic construct
  source 1..19: mol_type = other RNA
cagcttgaagcacagtgcc

SEQ ID NO: 707 - RNA, 19 nt, synthetic construct
  source 1..19: mol_type = other RNA
agcttgaagcacagtgcca

SEQ ID NO: 708 - RNA, 19 nt, synthetic construct
  source 1..19: mol_type = other RNA
gcttgaagcacagtgccag

SEQ ID NO: 709 - RNA, 19 nt, synthetic construct
  source 1..19: mol_type = other RNA
cttgaagcacagtgccagg

SEQ ID NO: 710 - RNA, 19 nt, synthetic construct
  source 1..19: mol_type = other RNA
ttgaagcacagtgccagga

SEQ ID NO: 711 - RNA, 19 nt, synthetic construct
  source 1..19: mol_type = other RNA
tgaagcacagtgccaggaa

SEQ ID NO: 712 - RNA, 19 nt, synthetic construct
  source 1..19: mol_type = other RNA
gaagcacagtgccaggaac

SEQ ID NO: 713 - RNA, 19 nt, synthetic construct
  source 1..19: mol_type = other RNA
aagcacagtgccaggaacc

SEQ ID NO: 714 - RNA, 19 nt, synthetic construct
  source 1..19: mol_type = other RNA
agcacagtgccaggaacct

SEQ ID NO: 715 - RNA, 19 nt, synthetic construct
  source 1..19: mol_type = other RNA
gcacagtgccaggaacctt

SEQ ID NO: 716 - RNA, 19 nt, synthetic construct
  source 1..19: mol_type = other RNA
cacagtgccaggaaccttg

SEQ ID NO: 717 - RNA, 19 nt, synthetic construct
  source 1..19: mol_type = other RNA
acagtgccaggaaccttgc

SEQ ID NO: 718 - RNA, 19 nt, synthetic construct
  source 1..19: mol_type = other RNA
cagtgccaggaaccttgca

SEQ ID NO: 719 - RNA, 19 nt, synthetic construct
  source 1..19: mol_type = other RNA
agtgccaggaaccttgcaa

SEQ ID NO: 720 - RNA, 19 nt, synthetic construct
  source 1..19: mol_type = other RNA
gtgccaggaaccttgcaaa

SEQ ID NO: 721 - RNA, 19 nt, synthetic construct
  source 1..19: mol_type = other RNA
tgccaggaaccttgcaaag

SEQ ID NO: 722 - RNA, 19 nt, synthetic construct
  source 1..19: mol_type = other RNA
gccaggaaccttgcaaaga

SEQ ID NO: 723 - RNA, 19 nt, synthetic construct
  source 1..19: mol_type = other RNA
ccaggaaccttgcaaagac

SEQ ID NO: 724 - RNA, 19 nt, synthetic construct
  source 1..19: mol_type = other RNA
caggaaccttgcaaagaca

SEQ ID NO: 725 - RNA, 19 nt, synthetic construct
  source 1..19: mol_type = other RNA
aggaaccttgcaaagacac

SEQ ID NO: 726 - RNA, 19 nt, synthetic construct
  source 1..19: mol_type = other RNA
ggaaccttgcaaagacacg

SEQ ID NO: 727 - RNA, 19 nt, synthetic construct
  source 1..19: mol_type = other RNA
gaaccttgcaaagacacgg

SEQ ID NO: 728 - RNA, 19 nt, synthetic construct
  source 1..19: mol_type = other RNA
aaccttgcaaagacacggt

SEQ ID NO: 729 - RNA, 19 nt, synthetic construct
  source 1..19: mol_type = other RNA
accttgcaaagacacggtg

SEQ ID NO: 730 - RNA, 19 nt, synthetic construct
  source 1..19: mol_type = other RNA
ccttgcaaagacacggtgc

SEQ ID NO: 731 - RNA, 19 nt, synthetic construct
  source 1..19: mol_type = other RNA
cttgcaaagacacggtgca

SEQ ID NO: 732 - RNA, 19 nt, synthetic construct
  source 1..19: mol_type = other RNA
ttgcaaagacacggtgcaa

SEQ ID NO: 733 - RNA, 19 nt, synthetic construct
  source 1..19: mol_type = other RNA
tgcaaagacacggtgcaaa

SEQ ID NO: 734 - RNA, 19 nt, synthetic construct
  source 1..19: mol_type = other RNA
gcaaagacacggtgcaaat

SEQ ID NO: 735 - RNA, 19 nt, synthetic construct
  source 1..19: mol_type = other RNA
caaagacacggtgcaaatc

SEQ ID NO: 736 - RNA, 19 nt, synthetic construct
  source 1..19: mol_type = other RNA
aaagacacggtgcaaatcc

SEQ ID NO: 737 - RNA, 19 nt, synthetic construct
  source 1..19: mol_type = other RNA
aagacacggtgcaaatcca

SEQ ID NO: 738 - RNA, 19 nt, synthetic construct
  source 1..19: mol_type = other RNA
agacacggtgcaaatccat

SEQ ID NO: 739 - RNA, 19 nt, synthetic construct
  source 1..19: mol_type = other RNA
gacacggtgcaaatccatg

SEQ ID NO: 740 - RNA, 19 nt, synthetic construct
  source 1..19: mol_type = other RNA
acacggtgcaaatccatga

SEQ ID NO: 741 - RNA, 19 nt, synthetic construct
  source 1..19: mol_type = other RNA
cacggtgcaaatccatgat

SEQ ID NO: 742 - RNA, 19 nt, synthetic construct
  source 1..19: mol_type = other RNA
acggtgcaaatccatgata

SEQ ID NO: 743 - RNA, 19 nt, synthetic construct
  source 1..19: mol_type = other RNA
cggtgcaaatccatgatat

SEQ ID NO: 744 - RNA, 19 nt, synthetic construct
  source 1..19: mol_type = other RNA
ggtgcaaatccatgatatc

SEQ ID NO: 745 - RNA, 19 nt, synthetic construct
  source 1..19: mol_type = other RNA
gtgcaaatccatgatatca

SEQ ID NO: 746 - RNA, 19 nt, synthetic construct
  source 1..19: mol_type = other RNA
tgcaaatccatgatatcac

SEQ ID NO: 747 - RNA, 19 nt, synthetic construct
  source 1..19: mol_type = other RNA
gcaaatccatgatatcact

SEQ ID NO: 748 - RNA, 19 nt, synthetic construct
  source 1..19: mol_type = other RNA
caaatccatgatatcactg

SEQ ID NO: 749 - RNA, 19 nt, synthetic construct
  source 1..19: mol_type = other RNA
aaatccatgatatcactgg

SEQ ID NO: 750 - RNA, 19 nt, synthetic construct
  source 1..19: mol_type = other RNA
aatccatgatatcactggg

SEQ ID NO: 751 - RNA, 19 nt, synthetic construct
  source 1..19: mol_type = other RNA
atccatgatatcactggga

SEQ ID NO: 752 - RNA, 19 nt, synthetic construct
  source 1..19: mol_type = other RNA
tccatgatatcactgggaa

SEQ ID NO: 753 - RNA, 19 nt, synthetic construct
  source 1..19: mol_type = other RNA
ccatgatatcactgggaaa

SEQ ID NO: 754 - RNA, 19 nt, synthetic construct
  source 1..19: mol_type = other RNA
catgatatcactgggaaag

SEQ ID NO: 755 - RNA, 19 nt, synthetic construct
  source 1..19: mol_type = other RNA
atgatatcactgggaaaga

SEQ ID NO: 756 - RNA, 19 nt, synthetic construct
  source 1..19: mol_type = other RNA
tgatatcactgggaaagat

SEQ ID NO: 757 - RNA, 19 nt, synthetic construct
  source 1..19: mol_type = other RNA
gatatcactgggaaagatt

SEQ ID NO: 758 - RNA, 19 nt, synthetic construct
  source 1..19: mol_type = other RNA
atatcactgggaaagattg

SEQ ID NO: 759 - RNA, 19 nt, synthetic construct
  source 1..19: mol_type = other RNA
tatcactgggaaagattgt

SEQ ID NO: 760 - RNA, 19 nt, synthetic construct
  source 1..19: mol_type = other RNA
atcactgggaaagattgtc

SEQ ID NO: 761 - RNA, 19 nt, synthetic construct
  source 1..19: mol_type = other RNA
tcactgggaaagattgtca

SEQ ID NO: 762 - RNA, 19 nt, synthetic construct
  source 1..19: mol_type = other RNA
cactgggaaagattgtcaa

SEQ ID NO: 763 - RNA, 19 nt, synthetic construct
  source 1..19: mol_type = other RNA
actgggaaagattgtcaag

SEQ ID NO: 764 - RNA, 19 nt, synthetic construct
  source 1..19: mol_type = other RNA
ctgggaaagattgtcaaga

SEQ ID NO: 765 - RNA, 19 nt, synthetic construct
  source 1..19: mol_type = other RNA
tgggaaagattgtcaagac

SEQ ID NO: 766 - RNA, 19 nt, synthetic construct
  source 1..19: mol_type = other RNA
gggaaagattgtcaagaca

SEQ ID NO: 767 - RNA, 19 nt, synthetic construct
  source 1..19: mol_type = other RNA
ggaaagattgtcaagacat

SEQ ID NO: 768 - RNA, 19 nt, synthetic construct
  source 1..19: mol_type = other RNA
gaaagattgtcaagacatt

SEQ ID NO: 769 - RNA, 19 nt, synthetic construct
  source 1..19: mol_type = other RNA
aaagattgtcaagacattg

SEQ ID NO: 770 - RNA, 19 nt, synthetic construct
  source 1..19: mol_type = other RNA
aagattgtcaagacattgc

SEQ ID NO: 771 - RNA, 19 nt, synthetic construct
  source 1..19: mol_type = other RNA
agattgtcaagacattgcc

SEQ ID NO: 772 - RNA, 19 nt, synthetic construct
  source 1..19: mol_type = other RNA
gattgtcaagacattgcca

SEQ ID NO: 773 - RNA, 19 nt, synthetic construct
  source 1..19: mol_type = other RNA
attgtcaagacattgccaa

SEQ ID NO: 774 - RNA, 19 nt, synthetic construct
  source 1..19: mol_type = other RNA
ttgtcaagacattgccaat

SEQ ID NO: 775 - RNA, 19 nt, synthetic construct
  source 1..19: mol_type = other RNA
tgtcaagacattgccaata

SEQ ID NO: 776 - RNA, 19 nt, synthetic construct
  source 1..19: mol_type = other RNA
gtcaagacattgccaataa

SEQ ID NO: 777 - RNA, 19 nt, synthetic construct
  source 1..19: mol_type = other RNA
tcaagacattgccaataag

SEQ ID NO: 778 - RNA, 19 nt, synthetic construct
  source 1..19: mol_type = other RNA
caagacattgccaataagg

SEQ ID NO: 779 - RNA, 19 nt, synthetic construct
  source 1..19: mol_type = other RNA
aagacattgccaataaggg

SEQ ID NO: 780 - RNA, 19 nt, synthetic construct
  source 1..19: mol_type = other RNA
agacattgccaataaggga

SEQ ID NO: 781 - RNA, 19 nt, synthetic construct
  source 1..19: mol_type = other RNA
gacattgccaataagggag

SEQ ID NO: 782 - RNA, 19 nt, synthetic construct
  source 1..19: mol_type = other RNA
acattgccaataagggagc

SEQ ID NO: 783 - RNA, 19 nt, synthetic construct
  source 1..19: mol_type = other RNA
cattgccaataagggagct

SEQ ID NO: 784 - RNA, 19 nt, synthetic construct
  source 1..19: mol_type = other RNA
attgccaataagggagcta

SEQ ID NO: 785 - RNA, 19 nt, synthetic construct
  source 1..19: mol_type = other RNA
ttgccaataagggagctaa

SEQ ID NO: 786 - RNA, 19 nt, synthetic construct
  source 1..19: mol_type = other RNA
tgccaataagggagctaaa

SEQ ID NO: 787 - RNA, 19 nt, synthetic construct
  source 1..19: mol_type = other RNA
gccaataagggagctaaac

SEQ ID NO: 788 - RNA, 19 nt, synthetic construct
  source 1..19: mol_type = other RNA
ccaataagggagctaaaca

SEQ ID NO: 789 - RNA, 19 nt, synthetic construct
  source 1..19: mol_type = other RNA
caataagggagctaaacag

SEQ ID NO: 790 - RNA, 19 nt, synthetic construct
  source 1..19: mol_type = other RNA
aataagggagctaaacaga

SEQ ID NO: 791 - RNA, 19 nt, synthetic construct
  source 1..19: mol_type = other RNA
ataagggagctaaacagag

SEQ ID NO: 792 - RNA, 19 nt, synthetic construct
  source 1..19: mol_type = other RNA
taagggagctaaacagagc

SEQ ID NO: 793 - RNA, 19 nt, synthetic construct
  source 1..19: mol_type = other RNA
aagggagctaaacagagcg

SEQ ID NO: 794 - RNA, 19 nt, synthetic construct
  source 1..19: mol_type = other RNA
agggagctaaacagagcgg

SEQ ID NO: 795 - RNA, 19 nt, synthetic construct
  source 1..19: mol_type = other RNA
gggagctaaacagagcggg

SEQ ID NO: 796 - RNA, 19 nt, synthetic construct
  source 1..19: mol_type = other RNA
ggagctaaacagagcgggc

SEQ ID NO: 797 - RNA, 19 nt, synthetic construct
  source 1..19: mol_type = other RNA
gagctaaacagagcgggct

SEQ ID NO: 798 - RNA, 19 nt, synthetic construct
  source 1..19: mol_type = other RNA
agctaaacagagcgggctt

SEQ ID NO: 799 - RNA, 19 nt, synthetic construct
  source 1..19: mol_type = other RNA
gctaaacagagcgggcttt

SEQ ID NO: 800 - RNA, 19 nt, synthetic construct
  source 1..19: mol_type = other RNA
ctaaacagagcgggcttta

SEQ ID NO: 801 - RNA, 19 nt, synthetic construct
  source 1..19: mol_type = other RNA
taaacagagcgggctttac

SEQ ID NO: 802 - RNA, 19 nt, synthetic construct
  source 1..19: mol_type = other RNA
aaacagagcgggctttact

SEQ ID NO: 803 - RNA, 19 nt, synthetic construct
  source 1..19: mol_type = other RNA
aacagagcgggctttactt

SEQ ID NO: 804 - RNA, 19 nt, synthetic construct
  source 1..19: mol_type = other RNA
acagagcgggctttacttt

SEQ ID NO: 805 - RNA, 19 nt, synthetic construct
  source 1..19: mol_type = other RNA
cagagcgggctttacttta

SEQ ID NO: 806 - RNA, 19 nt, synthetic construct
  source 1..19: mol_type = other RNA
agagcgggctttactttat

SEQ ID NO: 807 - RNA, 19 nt, synthetic construct
  source 1..19: mol_type = other RNA
gagcgggctttactttatt

SEQ ID NO: 808 - RNA, 19 nt, synthetic construct
  source 1..19: mol_type = other RNA
agcgggctttactttatta

SEQ ID NO: 809 - RNA, 19 nt, synthetic construct
  source 1..19: mol_type = other RNA
gcgggctttactttattaa

SEQ ID NO: 810 - RNA, 19 nt, synthetic construct
  source 1..19: mol_type = other RNA
cgggctttactttattaaa

SEQ ID NO: 811 - RNA, 19 nt, synthetic construct
  source 1..19: mol_type = other RNA
gggctttactttattaaac

SEQ ID NO: 812 - RNA, 19 nt, synthetic construct
  source 1..19: mol_type = other RNA
ggctttactttattaaacc

SEQ ID NO: 813 - RNA, 19 nt, synthetic construct
  source 1..19: mol_type = other RNA
gctttactttattaaacct

SEQ ID NO: 814 - RNA, 19 nt, synthetic construct
  source 1..19: mol_type = other RNA
ctttactttattaaacctc

SEQ ID NO: 815 - RNA, 19 nt, synthetic construct
  source 1..19: mol_type = other RNA
tttactttattaaacctct

SEQ ID NO: 816 - RNA, 19 nt, synthetic construct
  source 1..19: mol_type = other RNA
ttactttattaaacctctg

SEQ ID NO: 817 - RNA, 19 nt, synthetic construct
  source 1..19: mol_type = other RNA
tactttattaaacctctga

SEQ ID NO: 818 - RNA, 19 nt, synthetic construct
  source 1..19: mol_type = other RNA
actttattaaacctctgaa

SEQ ID NO: 819 - RNA, 19 nt, synthetic construct
  source 1..19: mol_type = other RNA
ctttattaaacctctgaaa

SEQ ID NO: 820 - RNA, 19 nt, synthetic construct
  source 1..19: mol_type = other RNA
tttattaaacctctgaaag

SEQ ID NO: 821 - RNA, 19 nt, synthetic construct
  source 1..19: mol_type = other RNA
ttattaaacctctgaaagc

SEQ ID NO: 822 - RNA, 19 nt, synthetic construct
  source 1..19: mol_type = other RNA
tattaaacctctgaaagct

SEQ ID NO: 823 - RNA, 19 nt, synthetic construct
  source 1..19: mol_type = other RNA
attaaacctctgaaagcta

SEQ ID NO: 824 - RNA, 19 nt, synthetic construct
  source 1..19: mol_type = other RNA
ttaaacctctgaaagctaa

SEQ ID NO: 825 - RNA, 19 nt, synthetic construct
  source 1..19: mol_type = other RNA
taaacctctgaaagctaac

SEQ ID NO: 826 - RNA, 19 nt, synthetic construct
  source 1..19: mol_type = other RNA
aaacctctgaaagctaacc

SEQ ID NO: 827 - RNA, 19 nt, synthetic construct
  source 1..19: mol_type = other RNA
aacctctgaaagctaacca

SEQ ID NO: 828 - RNA, 19 nt, synthetic construct
  source 1..19: mol_type = other RNA
acctctgaaagctaaccag

SEQ ID NO: 829 - RNA, 19 nt, synthetic construct
  source 1..19: mol_type = other RNA
cctctgaaagctaaccagc

SEQ ID NO: 830 - RNA, 19 nt, synthetic construct
  source 1..19: mol_type = other RNA
ctctgaaagctaaccagca

SEQ ID NO: 831 - RNA, 19 nt, synthetic construct
  source 1..19: mol_type = other RNA
tctgaaagctaaccagcaa

SEQ ID NO: 832 - RNA, 19 nt, synthetic construct
  source 1..19: mol_type = other RNA
ctgaaagctaaccagcaat

SEQ ID NO: 833 - RNA, 19 nt, synthetic construct
  source 1..19: mol_type = other RNA
tgaaagctaaccagcaatt

SEQ ID NO: 834 - RNA, 19 nt, synthetic construct
  source 1..19: mol_type = other RNA
gaaagctaaccagcaattc

SEQ ID NO: 835 - RNA, 19 nt, synthetic construct
  source 1..19: mol_type = other RNA
aaagctaaccagcaattct

SEQ ID NO: 836 - RNA, 19 nt, synthetic construct
  source 1..19: mol_type = other RNA
aagctaaccagcaattctt

SEQ ID NO: 837 - RNA, 19 nt, synthetic construct
  source 1..19: mol_type = other RNA
agctaaccagcaattctta

SEQ ID NO: 838 - RNA, 19 nt, synthetic construct
  source 1..19: mol_type = other RNA
gctaaccagcaattcttag

SEQ ID NO: 839 - RNA, 19 nt, synthetic construct
  source 1..19: mol_type = other RNA
ctaaccagcaattcttagt

SEQ ID NO: 840 - RNA, 19 nt, synthetic construct
  source 1..19: mol_type = other RNA
taaccagcaattcttagtc

SEQ ID NO: 841 - RNA, 19 nt, synthetic construct
  source 1..19: mol_type = other RNA
aaccagcaattcttagtct

SEQ ID NO: 842 - RNA, 19 nt, synthetic construct
  source 1..19: mol_type = other RNA
accagcaattcttagtcta

SEQ ID NO: 843 - RNA, 19 nt, synthetic construct
  source 1..19: mol_type = other RNA
ccagcaattcttagtctac

SEQ ID NO: 844 - RNA, 19 nt, synthetic construct
  source 1..19: mol_type = other RNA
cagcaattcttagtctact

SEQ ID NO: 845 - RNA, 19 nt, synthetic construct
  source 1..19: mol_type = other RNA
agcaattcttagtctactg

SEQ ID NO: 846 - RNA, 19 nt, synthetic construct
  source 1..19: mol_type = other RNA
gcaattcttagtctactgt

SEQ ID NO: 847 - RNA, 19 nt, synthetic construct
  source 1..19: mol_type = other RNA
caattcttagtctactgtg

SEQ ID NO: 848 - RNA, 19 nt, synthetic construct
  source 1..19: mol_type = other RNA
aattcttagtctactgtga

SEQ ID NO: 849 - RNA, 19 nt, synthetic construct
  source 1..19: mol_type = other RNA
attcttagtctactgtgaa

SEQ ID NO: 850 - RNA, 19 nt, synthetic construct
  source 1..19: mol_type = other RNA
ttcttagtctactgtgaaa

SEQ ID NO: 851 - RNA, 19 nt, synthetic construct
  source 1..19: mol_type = other RNA
tcttagtctactgtgaaat

SEQ ID NO: 852 - RNA, 19 nt, synthetic construct
  source 1..19: mol_type = other RNA
cttagtctactgtgaaatc

SEQ ID NO: 853 - RNA, 19 nt, synthetic construct
  source 1..19: mol_type = other RNA
ttagtctactgtgaaatcg

SEQ ID NO: 854 - RNA, 19 nt, synthetic construct
  source 1..19: mol_type = other RNA
tagtctactgtgaaatcga

SEQ ID NO: 855 - RNA, 19 nt, synthetic construct
  source 1..19: mol_type = other RNA
agtctactgtgaaatcgat

SEQ ID NO: 856 - RNA, 19 nt, synthetic construct
  source 1..19: mol_type = other RNA
gtctactgtgaaatcgatg

SEQ ID NO: 857 - RNA, 19 nt, synthetic construct
  source 1..19: mol_type = other RNA
tctactgtgaaatcgatgg

SEQ ID NO: 858 - RNA, 19 nt, synthetic construct
  source 1..19: mol_type = other RNA
ctactgtgaaatcgatggg

SEQ ID NO: 859 - RNA, 19 nt, synthetic construct
  source 1..19: mol_type = other RNA
tactgtgaaatcgatgggt

SEQ ID NO: 860 - RNA, 19 nt, synthetic construct
  source 1..19: mol_type = other RNA
actgtgaaatcgatgggtc

SEQ ID NO: 861 - RNA, 19 nt, synthetic construct
  source 1..19: mol_type = other RNA
ctgtgaaatcgatgggtct

SEQ ID NO: 862 - RNA, 19 nt, synthetic construct
  source 1..19: mol_type = other RNA
tgtgaaatcgatgggtctg

SEQ ID NO: 863 - RNA, 19 nt, synthetic construct
  source 1..19: mol_type = other RNA
gtgaaatcgatgggtctgg

SEQ ID NO: 864 - RNA, 19 nt, synthetic construct
  source 1..19: mol_type = other RNA
tgaaatcgatgggtctgga

SEQ ID NO: 865 - RNA, 19 nt, synthetic construct
  source 1..19: mol_type = other RNA
gaaatcgatgggtctggaa

SEQ ID NO: 866 - RNA, 19 nt, synthetic construct
  source 1..19: mol_type = other RNA
aaatcgatgggtctggaaa

SEQ ID NO: 867 - RNA, 19 nt, synthetic construct
  source 1..19: mol_type = other RNA
aatcgatgggtctggaaat

SEQ ID NO: 868 - RNA, 19 nt, synthetic construct
  source 1..19: mol_type = other RNA
atcgatgggtctggaaatg

SEQ ID NO: 869 - RNA, 19 nt, synthetic construct
  source 1..19: mol_type = other RNA
tcgatgggtctggaaatgg

SEQ ID NO: 870 - RNA, 19 nt, synthetic construct
  source 1..19: mol_type = other RNA
cgatgggtctggaaatgga

SEQ ID NO: 871 - RNA, 19 nt, synthetic construct
  source 1..19: mol_type = other RNA
gatgggtctggaaatggat

SEQ ID NO: 872 - RNA, 19 nt, synthetic construct
  source 1..19: mol_type = other RNA
atgggtctggaaatggatg

SEQ ID NO: 873 - RNA, 19 nt, synthetic construct
  source 1..19: mol_type = other RNA
tgggtctggaaatggatgg

SEQ ID NO: 874 - RNA, 19 nt, synthetic construct
  source 1..19: mol_type = other RNA
gggtctggaaatggatgga

SEQ ID NO: 875 - RNA, 19 nt, synthetic construct
  source 1..19: mol_type = other RNA
ggtctggaaatggatggac

SEQ ID NO: 876 - RNA, 19 nt, synthetic construct
  source 1..19: mol_type = other RNA
gtctggaaatggatggact

SEQ ID NO: 877 - RNA, 19 nt, synthetic construct
  source 1..19: mol_type = other RNA
tctggaaatggatggactg

SEQ ID NO: 878 - RNA, 19 nt, synthetic construct
  source 1..19: mol_type = other RNA
ctggaaatggatggactgt

SEQ ID NO: 879 - RNA, 19 nt, synthetic construct
  source 1..19: mol_type = other RNA
tggaaatggatggactgtg

SEQ ID NO: 880 - RNA, 19 nt, synthetic construct
  source 1..19: mol_type = other RNA
ggaaatggatggactgtgt

SEQ ID NO: 881 - RNA, 19 nt, synthetic construct
  source 1..19: mol_type = other RNA
gaaatggatggactgtgtt

SEQ ID NO: 882 - RNA, 19 nt, synthetic construct
  source 1..19: mol_type = other RNA
aaatggatggactgtgttt

SEQ ID NO: 883 - RNA, 19 nt, synthetic construct
  source 1..19: mol_type = other RNA
aatggatggactgtgtttc

SEQ ID NO: 884 - RNA, 19 nt, synthetic construct
  source 1..19: mol_type = other RNA
atggatggactgtgtttca

SEQ ID NO: 885 - RNA, 19 nt, synthetic construct
  source 1..19: mol_type = other RNA
tggatggactgtgtttcag

SEQ ID NO: 886 - RNA, 19 nt, synthetic construct
  source 1..19: mol_type = other RNA
ggatggactgtgtttcaga

SEQ ID NO: 887 - RNA, 19 nt, synthetic construct
  source 1..19: mol_type = other RNA
gatggactgtgtttcagaa

SEQ ID NO: 888 - RNA, 19 nt, synthetic construct
  source 1..19: mol_type = other RNA
atggactgtgtttcagaag

SEQ ID NO: 889 - RNA, 19 nt, synthetic construct
  source 1..19: mol_type = other RNA
tggactgtgtttcagaaga

SEQ ID NO: 890 - RNA, 19 nt, synthetic construct
  source 1..19: mol_type = other RNA
ggactgtgtttcagaagag

SEQ ID NO: 891 - RNA, 19 nt, synthetic construct
  source 1..19: mol_type = other RNA
gactgtgtttcagaagaga

SEQ ID NO: 892 - RNA, 19 nt, synthetic construct
  source 1..19: mol_type = other RNA
actgtgtttcagaagagac

SEQ ID NO: 893 - RNA, 19 nt, synthetic construct
  source 1..19: mol_type = other RNA
ctgtgtttcagaagagact

SEQ ID NO: 894 - RNA, 19 nt, synthetic construct
  source 1..19: mol_type = other RNA
tgtgtttcagaagagactt

SEQ ID NO: 895 - RNA, 19 nt, synthetic construct
  source 1..19: mol_type = other RNA
gtgtttcagaagagacttg

SEQ ID NO: 896 - RNA, 19 nt, synthetic construct
  source 1..19: mol_type = other RNA
tgtttcagaagagacttga

SEQ ID NO: 897 - RNA, 19 nt, synthetic construct
  source 1..19: mol_type = other RNA
gtttcagaagagacttgat

SEQ ID NO: 898 - RNA, 19 nt, synthetic construct
  source 1..19: mol_type = other RNA
tttcagaagagacttgatg

SEQ ID NO: 899 - RNA, 19 nt, synthetic construct
  source 1..19: mol_type = other RNA
ttcagaagagacttgatgg

SEQ ID NO: 900 - RNA, 19 nt, synthetic construct
  source 1..19: mol_type = other RNA
tcagaagagacttgatggc

SEQ ID NO: 901 - RNA, 19 nt, synthetic construct
  source 1..19: mol_type = other RNA
cagaagagacttgatggca

SEQ ID NO: 902 - RNA, 19 nt, synthetic construct
  source 1..19: mol_type = other RNA
agaagagacttgatggcag

SEQ ID NO: 903 - RNA, 19 nt, synthetic construct
  source 1..19: mol_type = other RNA
gaagagacttgatggcagt

SEQ ID NO: 904 - RNA, 19 nt, synthetic construct
  source 1..19: mol_type = other RNA
aagagacttgatggcagtg

SEQ ID NO: 905 - RNA, 19 nt, synthetic construct
  source 1..19: mol_type = other RNA
agagacttgatggcagtgt

SEQ ID NO: 906 - RNA, 19 nt, synthetic construct
  source 1..19: mol_type = other RNA
gagacttgatggcagtgta

SEQ ID NO: 907 - RNA, 19 nt, synthetic construct
  source 1..19: mol_type = other RNA
agacttgatggcagtgtag

SEQ ID NO: 908 - RNA, 19 nt, synthetic construct
  source 1..19: mol_type = other RNA
gacttgatggcagtgtaga

SEQ ID NO: 909 - RNA, 19 nt, synthetic construct
  source 1..19: mol_type = other RNA
acttgatggcagtgtagat

SEQ ID NO: 910 - RNA, 19 nt, synthetic construct
  source 1..19: mol_type = other RNA
cttgatggcagtgtagatt

SEQ ID NO: 911 - RNA, 19 nt, synthetic construct
  source 1..19: mol_type = other RNA
ttgatggcagtgtagattt

SEQ ID NO: 912 - RNA, 19 nt, synthetic construct
  source 1..19: mol_type = other RNA
tgatggcagtgtagatttc

SEQ ID NO: 913 - RNA, 19 nt, synthetic construct
  source 1..19: mol_type = other RNA
gatggcagtgtagatttca

SEQ ID NO: 914 - RNA, 19 nt, synthetic construct
  source 1..19: mol_type = other RNA
atggcagtgtagatttcaa

SEQ ID NO: 915 - RNA, 19 nt, synthetic construct
  source 1..19: mol_type = other RNA
tggcagtgtagatttcaag

SEQ ID NO: 916 - RNA, 19 nt, synthetic construct
  source 1..19: mol_type = other RNA
ggcagtgtagatttcaaga

SEQ ID NO: 917 - RNA, 19 nt, synthetic construct
  source 1..19: mol_type = other RNA
gcagtgtagatttcaagaa

SEQ ID NO: 918 - RNA, 19 nt, synthetic construct
  source 1..19: mol_type = other RNA
cagtgtagatttcaagaaa

SEQ ID NO: 919 - RNA, 19 nt, synthetic construct
  source 1..19: mol_type = other RNA
agtgtagatttcaagaaaa

SEQ ID NO: 920 - RNA, 19 nt, synthetic construct
  source 1..19: mol_type = other RNA
gtgtagatttcaagaaaaa

SEQ ID NO: 921 - RNA, 19 nt, synthetic construct
  source 1..19: mol_type = other RNA
tgtagatttcaagaaaaac

SEQ ID NO: 922 - RNA, 19 nt, synthetic construct
  source 1..19: mol_type = other RNA
gtagatttcaagaaaaact

SEQ ID NO: 923 - RNA, 19 nt, synthetic construct
  source 1..19: mol_type = other RNA
tagatttcaagaaaaactg

SEQ ID NO: 924 - RNA, 19 nt, synthetic construct
  source 1..19: mol_type = other RNA
agatttcaagaaaaactgg

SEQ ID NO: 925 - RNA, 19 nt, synthetic construct
  source 1..19: mol_type = other RNA
gatttcaagaaaaactgga

SEQ ID NO: 926 - RNA, 19 nt, synthetic construct
  source 1..19: mol_type = other RNA
atttcaagaaaaactggat

SEQ ID NO: 927 - RNA, 19 nt, synthetic construct
  source 1..19: mol_type = other RNA
tttcaagaaaaactggatt

SEQ ID NO: 928 - RNA, 19 nt, synthetic construct
  source 1..19: mol_type = other RNA
ttcaagaaaaactggattc

SEQ ID NO: 929 - RNA, 19 nt, synthetic construct
  source 1..19: mol_type = other RNA
tcaagaaaaactggattca

SEQ ID NO: 930 - RNA, 19 nt, synthetic construct
  source 1..19: mol_type = other RNA
caagaaaaactggattcaa

SEQ ID NO: 931 - RNA, 19 nt, synthetic construct
  source 1..19: mol_type = other RNA
aagaaaaactggattcaat

SEQ ID NO: 932 - RNA, 19 nt, synthetic construct
  source 1..19: mol_type = other RNA
agaaaaactggattcaata

SEQ ID NO: 933 - RNA, 19 nt, synthetic construct
  source 1..19: mol_type = other RNA
gaaaaactggattcaatat

SEQ ID NO: 934 - RNA, 19 nt, synthetic construct
  source 1..19: mol_type = other RNA
aaaaactggattcaatata

SEQ ID NO: 935 - RNA, 19 nt, synthetic construct
  source 1..19: mol_type = other RNA
aaaactggattcaatataa

SEQ ID NO: 936 - RNA, 19 nt, synthetic construct
  source 1..19: mol_type = other RNA
aaactggattcaatataaa

SEQ ID NO: 937 - RNA, 19 nt, synthetic construct
  source 1..19: mol_type = other RNA
aactggattcaatataaag

SEQ ID NO: 938 - RNA, 19 nt, synthetic construct
  source 1..19: mol_type = other RNA
actggattcaatataaaga

SEQ ID NO: 939 - RNA, 19 nt, synthetic construct
  source 1..19: mol_type = other RNA
ctggattcaatataaagaa

SEQ ID NO: 940 - RNA, 19 nt, synthetic construct
  source 1..19: mol_type = other RNA
tggattcaatataaagaag

SEQ ID NO: 941 - RNA, 19 nt, synthetic construct
  source 1..19: mol_type = other RNA
ggattcaatataaagaagg

SEQ ID NO: 942 - RNA, 19 nt, synthetic construct
  source 1..19: mol_type = other RNA
gattcaatataaagaagga

SEQ ID NO: 943 - RNA, 19 nt, synthetic construct
  source 1..19: mol_type = other RNA
attcaatataaagaaggat

SEQ ID NO: 944 - RNA, 19 nt, synthetic construct
  source 1..19: mol_type = other RNA
ttcaatataaagaaggatt

SEQ ID NO: 945 - RNA, 19 nt, synthetic construct
  source 1..19: mol_type = other RNA
tcaatataaagaaggattt

SEQ ID NO: 946 - RNA, 19 nt, synthetic construct
  source 1..19: mol_type = other RNA
caatataaagaaggatttg

SEQ ID NO: 947 - RNA, 19 nt, synthetic construct
  source 1..19: mol_type = other RNA
aatataaagaaggatttgg

SEQ ID NO: 948 - RNA, 19 nt, synthetic construct
  source 1..19: mol_type = other RNA
atataaagaaggatttgga

SEQ ID NO: 949 - RNA, 19 nt, synthetic construct
  source 1..19: mol_type = other RNA
tataaagaaggatttggac

SEQ ID NO: 950 - RNA, 19 nt, synthetic construct
  source 1..19: mol_type = other RNA
ataaagaaggatttggaca

SEQ ID NO: 951 - RNA, 19 nt, synthetic construct
  source 1..19: mol_type = other RNA
taaagaaggatttggacat

SEQ ID NO: 952 - RNA, 19 nt, synthetic construct
  source 1..19: mol_type = other RNA
aaagaaggatttggacatc

SEQ ID NO: 953 - RNA, 19 nt, synthetic construct
  source 1..19: mol_type = other RNA
aagaaggatttggacatct

SEQ ID NO: 954 - RNA, 19 nt, synthetic construct
  source 1..19: mol_type = other RNA
agaaggatttggacatctg

SEQ ID NO: 955 - RNA, 19 nt, synthetic construct
  source 1..19: mol_type = other RNA
gaaggatttggacatctgt

SEQ ID NO: 956 - RNA, 19 nt, synthetic construct
  source 1..19: mol_type = other RNA
aaggatttggacatctgtc

SEQ ID NO: 957 - RNA, 19 nt, synthetic construct
  source 1..19: mol_type = other RNA
aggatttggacatctgtct

SEQ ID NO: 958 - RNA, 19 nt, synthetic construct
  source 1..19: mol_type = other RNA
ggatttggacatctgtctc

SEQ ID NO: 959 - RNA, 19 nt, synthetic construct
  source 1..19: mol_type = other RNA
gatttggacatctgtctcc

SEQ ID NO: 960 - RNA, 19 nt, synthetic construct
  source 1..19: mol_type = other RNA
atttggacatctgtctcct

SEQ ID NO: 961 - RNA, 19 nt, synthetic construct
  source 1..19: mol_type = other RNA
tttggacatctgtctccta

SEQ ID NO: 962 - RNA, 19 nt, synthetic construct
  source 1..19: mol_type = other RNA
ttggacatctgtctcctac

SEQ ID NO: 963 - RNA, 19 nt, synthetic construct
  source 1..19: mol_type = other RNA
tggacatctgtctcctact

SEQ ID NO: 964 - RNA, 19 nt, synthetic construct
  source 1..19: mol_type = other RNA
ggacatctgtctcctactg

SEQ ID NO: 965 - RNA, 19 nt, synthetic construct
  source 1..19: mol_type = other RNA
gacatctgtctcctactgg

SEQ ID NO: 966 - RNA, 19 nt, synthetic construct
  source 1..19: mol_type = other RNA
acatctgtctcctactggc

SEQ ID NO: 967 - RNA, 19 nt, synthetic construct
  source 1..19: mol_type = other RNA
catctgtctcctactggca

SEQ ID NO: 968 - RNA, 19 nt, synthetic construct
  source 1..19: mol_type = other RNA
atctgtctcctactggcac

SEQ ID NO: 969 - RNA, 19 nt, synthetic construct
  source 1..19: mol_type = other RNA
tctgtctcctactggcaca

SEQ ID NO: 970 - RNA, 19 nt, synthetic construct
  source 1..19: mol_type = other RNA
ctgtctcctactggcacaa

SEQ ID NO: 971 - RNA, 19 nt, synthetic construct
  source 1..19: mol_type = other RNA
tgtctcctactggcacaac

SEQ ID NO: 972 - RNA, 19 nt, synthetic construct
  source 1..19: mol_type = other RNA
gtctcctactggcacaaca

SEQ ID NO: 973 - RNA, 19 nt, synthetic construct
  source 1..19: mol_type = other RNA
tctcctactggcacaacag

SEQ ID NO: 974 - RNA, 19 nt, synthetic construct
  source 1..19: mol_type = other RNA
ctcctactggcacaacaga

SEQ ID NO: 975 - RNA, 19 nt, synthetic construct
  source 1..19: mol_type = other RNA
tcctactggcacaacagaa

SEQ ID NO: 976 - RNA, 19 nt, synthetic construct
  source 1..19: mol_type = other RNA
cctactggcacaacagaat

SEQ ID NO: 977 - RNA, 19 nt, synthetic construct
  source 1..19: mol_type = other RNA
ctactggcacaacagaatt

SEQ ID NO: 978 - RNA, 19 nt, synthetic construct
  source 1..19: mol_type = other RNA
tactggcacaacagaattt

SEQ ID NO: 979 - RNA, 19 nt, synthetic construct
  source 1..19: mol_type = other RNA
actggcacaacagaatttt

SEQ ID NO: 980 - RNA, 19 nt, synthetic construct
  source 1..19: mol_type = other RNA
ctggcacaacagaattttg

SEQ ID NO: 981 - RNA, 19 nt, synthetic construct
  source 1..19: mol_type = other RNA
tggcacaacagaattttgg

SEQ ID NO: 982 - RNA, 19 nt, synthetic construct
  source 1..19: mol_type = other RNA
ggcacaacagaattttggc

SEQ ID NO: 983 - RNA, 19 nt, synthetic construct
  source 1..19: mol_type = other RNA
gcacaacagaattttggct

SEQ ID NO: 984 - RNA, 19 nt, synthetic construct
  source 1..19: mol_type = other RNA
cacaacagaattttggctg

SEQ ID NO: 985 - RNA, 19 nt, synthetic construct
  source 1..19: mol_type = other RNA
acaacagaattttggctgg

SEQ ID NO: 986 - RNA, 19 nt, synthetic construct
  source 1..19: mol_type = other RNA
caacagaattttggctggg

SEQ ID NO: 987 - RNA, 19 nt, synthetic construct
  source 1..19: mol_type = other RNA
aacagaattttggctggga

SEQ ID NO: 988 - RNA, 19 nt, synthetic construct
  source 1..19: mol_type = other RNA
acagaattttggctgggaa

SEQ ID NO: 989 - RNA, 19 nt, synthetic construct
  source 1..19: mol_type = other RNA
cagaattttggctgggaaa

SEQ ID NO: 990 - RNA, 19 nt, synthetic construct
  source 1..19: mol_type = other RNA
agaattttggctgggaaat

SEQ ID NO: 991 - RNA, 19 nt, synthetic construct
  source 1..19: mol_type = other RNA
gaattttggctgggaaatg

SEQ ID NO: 992 - RNA, 19 nt, synthetic construct
  source 1..19: mol_type = other RNA
aattttggctgggaaatga

SEQ ID NO: 993 - RNA, 19 nt, synthetic construct
  source 1..19: mol_type = other RNA
attttggctgggaaatgag

SEQ ID NO: 994 - RNA, 19 nt, synthetic construct
  source 1..19: mol_type = other RNA
ttttggctgggaaatgaga

SEQ ID NO: 995 - RNA, 19 nt, synthetic construct
  source 1..19: mol_type = other RNA
tttggctgggaaatgagaa

SEQ ID NO: 996 - RNA, 19 nt, synthetic construct
  source 1..19: mol_type = other RNA
ttggctgggaaatgagaag

SEQ ID NO: 997 - RNA, 19 nt, synthetic construct
  source 1..19: mol_type = other RNA
tggctgggaaatgagaaga

SEQ ID NO: 998 - RNA, 19 nt, synthetic construct
  source 1..19: mol_type = other RNA
ggctgggaaatgagaagat

SEQ ID NO: 999 - RNA, 19 nt, synthetic construct
  source 1..19: mol_type = other RNA
gctgggaaatgagaagatt

SEQ ID NO: 1000 - RNA, 19 nt, synthetic construct
  source 1..19: mol_type = other RNA
ctgggaaatgagaagattc

SEQ ID NO: 1001 - RNA, 19 nt, synthetic construct
  source 1..19: mol_type = other RNA
tgggaaatgagaagattca

SEQ ID NO: 1002 - RNA, 19 nt, synthetic construct
  source 1..19: mol_type = other RNA
gggaaatgagaagattcat

SEQ ID NO: 1003 - RNA, 19 nt, synthetic construct
  source 1..19: mol_type = other RNA
ggaaatgagaagattcatt

SEQ ID NO: 1004 - RNA, 19 nt, synthetic construct
  source 1..19: mol_type = other RNA
gaaatgagaagattcattt

SEQ ID NO: 1005 - RNA, 19 nt, synthetic construct
  source 1..19: mol_type = other RNA
aaatgagaagattcatttg

SEQ ID NO: 1006 - RNA, 19 nt, synthetic construct
  source 1..19: mol_type = other RNA
aatgagaagattcatttga

SEQ ID NO: 1007 - RNA, 19 nt, synthetic construct
  source 1..19: mol_type = other RNA
atgagaagattcatttgat

SEQ ID NO: 1008 - RNA, 19 nt, synthetic construct
  source 1..19: mol_type = other RNA
tgagaagattcatttgata

SEQ ID NO: 1009 - RNA, 19 nt, synthetic construct
  source 1..19: mol_type = other RNA
gagaagattcatttgataa

SEQ ID NO: 1010 - RNA, 19 nt, synthetic construct
  source 1..19: mol_type = other RNA
agaagattcatttgataag

SEQ ID NO: 1011 - RNA, 19 nt, synthetic construct
  source 1..19: mol_type = other RNA
gaagattcatttgataagc

SEQ ID NO: 1012 - RNA, 19 nt, synthetic construct
  source 1..19: mol_type = other RNA
aagattcatttgataagca

SEQ ID NO: 1013 - RNA, 19 nt, synthetic construct
  source 1..19: mol_type = other RNA
agattcatttgataagcac

SEQ ID NO: 1014 - RNA, 19 nt, synthetic construct
  source 1..19: mol_type = other RNA
gattcatttgataagcaca

SEQ ID NO: 1015 - RNA, 19 nt, synthetic construct
  source 1..19: mol_type = other RNA
attcatttgataagcacac

SEQ ID NO: 1016 - RNA, 19 nt, synthetic construct
  source 1..19: mol_type = other RNA
ttcatttgataagcacaca

SEQ ID NO: 1017 - RNA, 19 nt, synthetic construct
  source 1..19: mol_type = other RNA
tcatttgataagcacacag

SEQ ID NO: 1018 - RNA, 19 nt, synthetic construct
  source 1..19: mol_type = other RNA
catttgataagcacacagt

SEQ ID NO: 1019 - RNA, 19 nt, synthetic construct
  source 1..19: mol_type = other RNA
atttgataagcacacagtc

SEQ ID NO: 1020 - RNA, 19 nt, synthetic construct
  source 1..19: mol_type = other RNA
tttgataagcacacagtct

SEQ ID NO: 1021 - RNA, 19 nt, synthetic construct
  source 1..19: mol_type = other RNA
ttgataagcacacagtctg

SEQ ID NO: 1022 - RNA, 19 nt, synthetic construct
  source 1..19: mol_type = other RNA
tgataagcacacagtctgc

SEQ ID NO: 1023 - RNA, 19 nt, synthetic construct
  source 1..19: mol_type = other RNA
gataagcacacagtctgcc

SEQ ID NO: 1024 - RNA, 19 nt, synthetic construct
  source 1..19: mol_type = other RNA
ataagcacacagtctgcca

SEQ ID NO: 1025 - RNA, 19 nt, synthetic construct
  source 1..19: mol_type = other RNA
taagcacacagtctgccat

SEQ ID NO: 1026 - RNA, 19 nt, synthetic construct
  source 1..19: mol_type = other RNA
aagcacacagtctgccatc

SEQ ID NO: 1027 - RNA, 19 nt, synthetic construct
  source 1..19: mol_type = other RNA
agcacacagtctgccatcc

SEQ ID NO: 1028 - RNA, 19 nt, synthetic construct
  source 1..19: mol_type = other RNA
gcacacagtctgccatccc

SEQ ID NO: 1029 - RNA, 19 nt, synthetic construct
  source 1..19: mol_type = other RNA
cacacagtctgccatccca

SEQ ID NO: 1030 - RNA, 19 nt, synthetic construct
  source 1..19: mol_type = other RNA
acacagtctgccatcccat

SEQ ID NO: 1031 - RNA, 19 nt, synthetic construct
  source 1..19: mol_type = other RNA
cacagtctgccatcccata

SEQ ID NO: 1032 - RNA, 19 nt, synthetic construct
  source 1..19: mol_type = other RNA
acagtctgccatcccatat

SEQ ID NO: 1033 - RNA, 19 nt, synthetic construct
  source 1..19: mol_type = other RNA
cagtctgccatcccatatg

SEQ ID NO: 1034 - RNA, 19 nt, synthetic construct
  source 1..19: mol_type = other RNA
agtctgccatcccatatgc

SEQ ID NO: 1035 - RNA, 19 nt, synthetic construct
  source 1..19: mol_type = other RNA
gtctgccatcccatatgca

SEQ ID NO: 1036 - RNA, 19 nt, synthetic construct
  source 1..19: mol_type = other RNA
tctgccatcccatatgcat

SEQ ID NO: 1037 - RNA, 19 nt, synthetic construct
  source 1..19: mol_type = other RNA
ctgccatcccatatgcatt

SEQ ID NO: 1038 - RNA, 19 nt, synthetic construct
  source 1..19: mol_type = other RNA
tgccatcccatatgcatta

SEQ ID NO: 1039 - RNA, 19 nt, synthetic construct
  source 1..19: mol_type = other RNA
gccatcccatatgcattaa

SEQ ID NO: 1040 - RNA, 19 nt, synthetic construct
  source 1..19: mol_type = other RNA
ccatcccatatgcattaag

SEQ ID NO: 1041 - RNA, 19 nt, synthetic construct
  source 1..19: mol_type = other RNA
catcccatatgcattaaga

SEQ ID NO: 1042 - RNA, 19 nt, synthetic construct
  source 1..19: mol_type = other RNA
atcccatatgcattaagag

SEQ ID NO: 1043 - RNA, 19 nt, synthetic construct
  source 1..19: mol_type = other RNA
tcccatatgcattaagagt

SEQ ID NO: 1044 - RNA, 19 nt, synthetic construct
  source 1..19: mol_type = other RNA
cccatatgcattaagagtg

SEQ ID NO: 1045 - RNA, 19 nt, synthetic construct
  source 1..19: mol_type = other RNA
ccatatgcattaagagtgg

SEQ ID NO: 1046 - RNA, 19 nt, synthetic construct
  source 1..19: mol_type = other RNA
catatgcattaagagtgga

SEQ ID NO: 1047 - RNA, 19 nt, synthetic construct
  source 1..19: mol_type = other RNA
atatgcattaagagtggaa

SEQ ID NO: 1048 - RNA, 19 nt, synthetic construct
  source 1..19: mol_type = other RNA
tatgcattaagagtggaac

SEQ ID NO: 1049 - RNA, 19 nt, synthetic construct
  source 1..19: mol_type = other RNA
atgcattaagagtggaact

SEQ ID NO: 1050 - RNA, 19 nt, synthetic construct
  source 1..19: mol_type = other RNA
tgcattaagagtggaactg

SEQ ID NO: 1051 - RNA, 19 nt, synthetic construct
  source 1..19: mol_type = other RNA
gcattaagagtggaactgg

SEQ ID NO: 1052 - RNA, 19 nt, synthetic construct
  source 1..19: mol_type = other RNA
cattaagagtggaactgga

SEQ ID NO: 1053 - RNA, 19 nt, synthetic construct
  source 1..19: mol_type = other RNA
attaagagtggaactggaa

SEQ ID NO: 1054 - RNA, 19 nt, synthetic construct
  source 1..19: mol_type = other RNA
ttaagagtggaactggaag

SEQ ID NO: 1055 - RNA, 19 nt, synthetic construct
  source 1..19: mol_type = other RNA
taagagtggaactggaaga

SEQ ID NO: 1056 - RNA, 19 nt, synthetic construct
  source 1..19: mol_type = other RNA
aagagtggaactggaagac

SEQ ID NO: 1057 - RNA, 19 nt, synthetic construct
  source 1..19: mol_type = other RNA
agagtggaactggaagact

SEQ ID NO: 1058 - RNA, 19 nt, synthetic construct
  source 1..19: mol_type = other RNA
gagtggaactggaagactg

SEQ ID NO: 1059 - RNA, 19 nt, synthetic construct
  source 1..19: mol_type = other RNA
agtggaactggaagactgg

SEQ ID NO: 1060 - RNA, 19 nt, synthetic construct
  source 1..19: mol_type = other RNA
gtggaactggaagactgga

SEQ ID NO: 1061 - RNA, 19 nt, synthetic construct
  source 1..19: mol_type = other RNA
tggaactggaagactggaa

SEQ ID NO: 1062 - RNA, 19 nt, synthetic construct
  source 1..19: mol_type = other RNA
ggaactggaagactggaat

SEQ ID NO: 1063 - RNA, 19 nt, synthetic construct
  source 1..19: mol_type = other RNA
gaactggaagactggaatg

SEQ ID NO: 1064 - RNA, 19 nt, synthetic construct
  source 1..19: mol_type = other RNA
aactggaagactggaatgg

SEQ ID NO: 1065 - RNA, 19 nt, synthetic construct
  source 1..19: mol_type = other RNA
actggaagactggaatggc

SEQ ID NO: 1066 - RNA, 19 nt, synthetic construct
  source 1..19: mol_type = other RNA
ctggaagactggaatggca

SEQ ID NO: 1067 - RNA, 19 nt, synthetic construct
  source 1..19: mol_type = other RNA
tggaagactggaatggcag

SEQ ID NO: 1068 - RNA, 19 nt, synthetic construct
  source 1..19: mol_type = other RNA
ggaagactggaatggcaga

SEQ ID NO: 1069 - RNA, 19 nt, synthetic construct
  source 1..19: mol_type = other RNA
gaagactggaatggcagaa

SEQ ID NO: 1070 - RNA, 19 nt, synthetic construct
  source 1..19: mol_type = other RNA
aagactggaatggcagaac

SEQ ID NO: 1071 - RNA, 19 nt, synthetic construct
  source 1..19: mol_type = other RNA
agactggaatggcagaacc

SEQ ID NO: 1072 - RNA, 19 nt, synthetic construct
  source 1..19: mol_type = other RNA
gactggaatggcagaacca

SEQ ID NO: 1073 - RNA, 19 nt, synthetic construct
  source 1..19: mol_type = other RNA
actggaatggcagaaccag

SEQ ID NO: 1074 - RNA, 19 nt, synthetic construct
  source 1..19: mol_type = other RNA
ctggaatggcagaaccagt

SEQ ID NO: 1075 - RNA, 19 nt, synthetic construct
  source 1..19: mol_type = other RNA
tggaatggcagaaccagta

SEQ ID NO: 1076 - RNA, 19 nt, synthetic construct
  source 1..19: mol_type = other RNA
ggaatggcagaaccagtac

SEQ ID NO: 1077 - RNA, 19 nt, synthetic construct
  source 1..19: mol_type = other RNA
gaatggcagaaccagtact

SEQ ID NO: 1078 - RNA, 19 nt, synthetic construct
  source 1..19: mol_type = other RNA
aatggcagaaccagtactg

SEQ ID NO: 1079 - RNA, 19 nt, synthetic construct
  source 1..19: mol_type = other RNA
atggcagaaccagtactgc

SEQ ID NO: 1080 - RNA, 19 nt, synthetic construct
  source 1..19: mol_type = other RNA
tggcagaaccagtactgca

SEQ ID NO: 1081 - RNA, 19 nt, synthetic construct
  source 1..19: mol_type = other RNA
ggcagaaccagtactgcag

SEQ ID NO: 1082 - RNA, 19 nt, synthetic construct
  source 1..19: mol_type = other RNA
gcagaaccagtactgcaga

SEQ ID NO: 1083 - RNA, 19 nt, synthetic construct
  source 1..19: mol_type = other RNA
cagaaccagtactgcagac

SEQ ID NO: 1084 - RNA, 19 nt, synthetic construct
  source 1..19: mol_type = other RNA
agaaccagtactgcagact

SEQ ID NO: 1085 - RNA, 19 nt, synthetic construct
  source 1..19: mol_type = other RNA
gaaccagtactgcagacta

SEQ ID NO: 1086 - RNA, 19 nt, synthetic construct
  source 1..19: mol_type = other RNA
aaccagtactgcagactat

SEQ ID NO: 1087 - RNA, 19 nt, synthetic construct
  source 1..19: mol_type = other RNA
accagtactgcagactatg

SEQ ID NO: 1088 - RNA, 19 nt, synthetic construct
  source 1..19: mol_type = other RNA
ccagtactgcagactatgc

SEQ ID NO: 1089 - RNA, 19 nt, synthetic construct
  source 1..19: mol_type = other RNA
cagtactgcagactatgcc

SEQ ID NO: 1090 - RNA, 19 nt, synthetic construct
  source 1..19: mol_type = other RNA
agtactgcagactatgcca

SEQ ID NO: 1091 - RNA, 19 nt, synthetic construct
  source 1..19: mol_type = other RNA
gtactgcagactatgccat

SEQ ID NO: 1092 - RNA, 19 nt, synthetic construct
  source 1..19: mol_type = other RNA
tactgcagactatgccatg

SEQ ID NO: 1093 - RNA, 19 nt, synthetic construct
  source 1..19: mol_type = other RNA
actgcagactatgccatgt

SEQ ID NO: 1094 - RNA, 19 nt, synthetic construct
  source 1..19: mol_type = other RNA
ctgcagactatgccatgtt

SEQ ID NO: 1095 - RNA, 19 nt, synthetic construct
  source 1..19: mol_type = other RNA
tgcagactatgccatgttc

SEQ ID NO: 1096 - RNA, 19 nt, synthetic construct
  source 1..19: mol_type = other RNA
gcagactatgccatgttca

SEQ ID NO: 1097 - RNA, 19 nt, synthetic construct
  source 1..19: mol_type = other RNA
cagactatgccatgttcaa

SEQ ID NO: 1098 - RNA, 19 nt, synthetic construct
  source 1..19: mol_type = other RNA
agactatgccatgttcaag

SEQ ID NO: 1099 - RNA, 19 nt, synthetic construct
  source 1..19: mol_type = other RNA
gactatgccatgttcaagg

SEQ ID NO: 1100 - RNA, 19 nt, synthetic construct
  source 1..19: mol_type = other RNA
actatgccatgttcaaggt

SEQ ID NO: 1101 - RNA, 19 nt, synthetic construct
  source 1..19: mol_type = other RNA
ctatgccatgttcaaggtg

SEQ ID NO: 1102 - RNA, 19 nt, synthetic construct
  source 1..19: mol_type = other RNA
tatgccatgttcaaggtgg

SEQ ID NO: 1103 - RNA, 19 nt, synthetic construct
  source 1..19: mol_type = other RNA
atgccatgttcaaggtggg

SEQ ID NO: 1104 - RNA, 19 nt, synthetic construct
  source 1..19: mol_type = other RNA
tgccatgttcaaggtggga

SEQ ID NO: 1105 - RNA, 19 nt, synthetic construct
  source 1..19: mol_type = other RNA
gccatgttcaaggtgggac

SEQ ID NO: 1106 - RNA, 19 nt, synthetic construct
  source 1..19: mol_type = other RNA
ccatgttcaaggtgggacc

SEQ ID NO: 1107 - RNA, 19 nt, synthetic construct
  source 1..19: mol_type = other RNA
catgttcaaggtgggacct

SEQ ID NO: 1108 - RNA, 19 nt, synthetic construct
  source 1..19: mol_type = other RNA
atgttcaaggtgggacctg

SEQ ID NO: 1109 - RNA, 19 nt, synthetic construct
  source 1..19: mol_type = other RNA
tgttcaaggtgggacctga

SEQ ID NO: 1110 - RNA, 19 nt, synthetic construct
  source 1..19: mol_type = other RNA
gttcaaggtgggacctgaa

SEQ ID NO: 1111 - RNA, 19 nt, synthetic construct
  source 1..19: mol_type = other RNA
ttcaaggtgggacctgaag

SEQ ID NO: 1112 - RNA, 19 nt, synthetic construct
  source 1..19: mol_type = other RNA
tcaaggtgggacctgaagc

SEQ ID NO: 1113 - RNA, 19 nt, synthetic construct
  source 1..19: mol_type = other RNA
caaggtgggacctgaagct

SEQ ID NO: 1114 - RNA, 19 nt, synthetic construct
  source 1..19: mol_type = other RNA
aaggtgggacctgaagctg

SEQ ID NO: 1115 - RNA, 19 nt, synthetic construct
  source 1..19: mol_type = other RNA
aggtgggacctgaagctga

SEQ ID NO: 1116 - RNA, 19 nt, synthetic construct
  source 1..19: mol_type = other RNA
ggtgggacctgaagctgac

SEQ ID NO: 1117 - RNA, 19 nt, synthetic construct
  source 1..19: mol_type = other RNA
gtgggacctgaagctgaca

SEQ ID NO: 1118 - RNA, 19 nt, synthetic construct
  source 1..19: mol_type = other RNA
tgggacctgaagctgacaa

SEQ ID NO: 1119 - RNA, 19 nt, synthetic construct
  source 1..19: mol_type = other RNA
gggacctgaagctgacaag

SEQ ID NO: 1120 - RNA, 19 nt, synthetic construct
  source 1..19: mol_type = other RNA
ggacctgaagctgacaagt

SEQ ID NO: 1121 - RNA, 19 nt, synthetic construct
  source 1..19: mol_type = other RNA
gacctgaagctgacaagta

SEQ ID NO: 1122 - RNA, 19 nt, synthetic construct
  source 1..19: mol_type = other RNA
acctgaagctgacaagtac

SEQ ID NO: 1123 - RNA, 19 nt, synthetic construct
  source 1..19: mol_type = other RNA
cctgaagctgacaagtacc

SEQ ID NO: 1124 - RNA, 19 nt, synthetic construct
  source 1..19: mol_type = other RNA
ctgaagctgacaagtaccg

SEQ ID NO: 1125 - RNA, 19 nt, synthetic construct
  source 1..19: mol_type = other RNA
tgaagctgacaagtaccgc

SEQ ID NO: 1126 - RNA, 19 nt, synthetic construct
  source 1..19: mol_type = other RNA
gaagctgacaagtaccgcc

SEQ ID NO: 1127 - RNA, 19 nt, synthetic construct
  source 1..19: mol_type = other RNA
aagctgacaagtaccgcct

SEQ ID NO: 1128 - RNA, 19 nt, synthetic construct
  source 1..19: mol_type = other RNA
agctgacaagtaccgccta

SEQ ID NO: 1129 - RNA, 19 nt, synthetic construct
  source 1..19: mol_type = other RNA
gctgacaagtaccgcctaa

SEQ ID NO: 1130 - RNA, 19 nt, synthetic construct
  source 1..19: mol_type = other RNA
ctgacaagtaccgcctaac

SEQ ID NO: 1131 - RNA, 19 nt, synthetic construct
  source 1..19: mol_type = other RNA
tgacaagtaccgcctaaca

SEQ ID NO: 1132 - RNA, 19 nt, synthetic construct
  source 1..19: mol_type = other RNA
gacaagtaccgcctaacat

SEQ ID NO: 1133 - RNA, 19 nt, synthetic construct
  source 1..19: mol_type = other RNA
acaagtaccgcctaacata

SEQ ID NO: 1134 - RNA, 19 nt, synthetic construct
  source 1..19: mol_type = other RNA
caagtaccgcctaacatat

SEQ ID NO: 1135 - RNA, 19 nt, synthetic construct
  source 1..19: mol_type = other RNA
aagtaccgcctaacatatg

SEQ ID NO: 1136 - RNA, 19 nt, synthetic construct
  source 1..19: mol_type = other RNA
agtaccgcctaacatatgc

SEQ ID NO: 1137 - RNA, 19 nt, synthetic construct
  source 1..19: mol_type = other RNA
gtaccgcctaacatatgcc

SEQ ID NO: 1138 - RNA, 19 nt, synthetic construct
  source 1..19: mol_type = other RNA
taccgcctaacatatgcct

SEQ ID NO: 1139 - RNA, 19 nt, synthetic construct
  source 1..19: mol_type = other RNA
accgcctaacatatgccta

SEQ ID NO: 1140 - RNA, 19 nt, synthetic construct
  source 1..19: mol_type = other RNA
ccgcctaacatatgcctac

SEQ ID NO: 1141 - RNA, 19 nt, synthetic construct
  source 1..19: mol_type = other RNA
cgcctaacatatgcctact

SEQ ID NO: 1142 - RNA, 19 nt, synthetic construct
  source 1..19: mol_type = other RNA
gcctaacatatgcctactt

SEQ ID NO: 1143 - RNA, 19 nt, synthetic construct
  source 1..19: mol_type = other RNA
cctaacatatgcctacttc

SEQ ID NO: 1144 - RNA, 19 nt, synthetic construct
  source 1..19: mol_type = other RNA
ctaacatatgcctacttcg

SEQ ID NO: 1145 - RNA, 19 nt, synthetic construct
  source 1..19: mol_type = other RNA
taacatatgcctacttcgc

SEQ ID NO: 1146 - RNA, 19 nt, synthetic construct
  source 1..19: mol_type = other RNA
aacatatgcctacttcgct

SEQ ID NO: 1147 - RNA, 19 nt, synthetic construct
  source 1..19: mol_type = other RNA
acatatgcctacttcgctg

SEQ ID NO: 1148 - RNA, 19 nt, synthetic construct
  source 1..19: mol_type = other RNA
catatgcctacttcgctgg

SEQ ID NO: 1149 - RNA, 19 nt, synthetic construct
  source 1..19: mol_type = other RNA
atatgcctacttcgctggt

SEQ ID NO: 1150 - RNA, 19 nt, synthetic construct
  source 1..19: mol_type = other RNA
tatgcctacttcgctggtg

SEQ ID NO: 1151 - RNA, 19 nt, synthetic construct
  source 1..19: mol_type = other RNA
atgcctacttcgctggtgg

SEQ ID NO: 1152 - RNA, 19 nt, synthetic construct
  source 1..19: mol_type = other RNA
tgcctacttcgctggtggg

SEQ ID NO: 1153 - RNA, 19 nt, synthetic construct
  source 1..19: mol_type = other RNA
gcctacttcgctggtgggg

SEQ ID NO: 1154 - RNA, 19 nt, synthetic construct
  source 1..19: mol_type = other RNA
cctacttcgctggtgggga

SEQ ID NO: 1155 - RNA, 19 nt, synthetic construct
  source 1..19: mol_type = other RNA
ctacttcgctggtggggat

SEQ ID NO: 1156 - RNA, 19 nt, synthetic construct
  source 1..19: mol_type = other RNA
tacttcgctggtggggatg

SEQ ID NO: 1157 - RNA, 19 nt, synthetic construct
  source 1..19: mol_type = other RNA
acttcgctggtggggatgc

SEQ ID NO: 1158 - RNA, 19 nt, synthetic construct
  source 1..19: mol_type = other RNA
cttcgctggtggggatgct

SEQ ID NO: 1159 - RNA, 19 nt, synthetic construct
  source 1..19: mol_type = other RNA
ttcgctggtggggatgctg

SEQ ID NO: 1160 - RNA, 19 nt, synthetic construct
  source 1..19: mol_type = other RNA
tcgctggtggggatgctgg

SEQ ID NO: 1161 - RNA, 19 nt, synthetic construct
  source 1..19: mol_type = other RNA
cgctggtggggatgctgga

SEQ ID NO: 1162 - RNA, 19 nt, synthetic construct
  source 1..19: mol_type = other RNA
gctggtggggatgctggag

SEQ ID NO: 1163 - RNA, 19 nt, synthetic construct
  source 1..19: mol_type = other RNA
ctggtggggatgctggaga

SEQ ID NO: 1164 - RNA, 19 nt, synthetic construct
  source 1..19: mol_type = other RNA
tggtggggatgctggagat

SEQ ID NO: 1165 - RNA, 19 nt, synthetic construct
  source 1..19: mol_type = other RNA
ggtggggatgctggagatg

SEQ ID NO: 1166 - RNA, 19 nt, synthetic construct
  source 1..19: mol_type = other RNA
gtggggatgctggagatgc

SEQ ID NO: 1167 - RNA, 19 nt, synthetic construct
  source 1..19: mol_type = other RNA
tggggatgctggagatgcc

SEQ ID NO: 1168 - RNA, 19 nt, synthetic construct
  source 1..19: mol_type = other RNA
ggggatgctggagatgcct

SEQ ID NO: 1169 - RNA, 19 nt, synthetic construct
  source 1..19: mol_type = other RNA
gggatgctggagatgcctt

SEQ ID NO: 1170 - RNA, 19 nt, synthetic construct
  source 1..19: mol_type = other RNA
ggatgctggagatgccttt

SEQ ID NO: 1171 - RNA, 19 nt, synthetic construct
  source 1..19: mol_type = other RNA
gatgctggagatgcctttg

SEQ ID NO: 1172 - RNA, 19 nt, synthetic construct
  source 1..19: mol_type = other RNA
atgctggagatgcctttga

SEQ ID NO: 1173 - RNA, 19 nt, synthetic construct
  source 1..19: mol_type = other RNA
tgctggagatgcctttgat

SEQ ID NO: 1174 - RNA, 19 nt, synthetic construct
  source 1..19: mol_type = other RNA
gctggagatgcctttgatg

SEQ ID NO: 1175 - RNA, 19 nt, synthetic construct
  source 1..19: mol_type = other RNA
ctggagatgcctttgatgg

SEQ ID NO: 1176 - RNA, 19 nt, synthetic construct
  source 1..19: mol_type = other RNA
tggagatgcctttgatggc

SEQ ID NO: 1177 - RNA, 19 nt, synthetic construct
  source 1..19: mol_type = other RNA
ggagatgcctttgatggct

SEQ ID NO: 1178 - RNA, 19 nt, synthetic construct
  source 1..19: mol_type = other RNA
gagatgcctttgatggctt

SEQ ID NO: 1179 - RNA, 19 nt, synthetic construct
  source 1..19: mol_type = other RNA
agatgcctttgatggcttt

SEQ ID NO: 1180 - RNA, 19 nt, synthetic construct
  source 1..19: mol_type = other RNA
gatgcctttgatggctttg

SEQ ID NO: 1181 - RNA, 19 nt, synthetic construct
  source 1..19: mol_type = other RNA
atgcctttgatggctttga

SEQ ID NO: 1182 - RNA, 19 nt, synthetic construct
  source 1..19: mol_type = other RNA
tgcctttgatggctttgat

SEQ ID NO: 1183 - RNA, 19 nt, synthetic construct
  source 1..19: mol_type = other RNA
gcctttgatggctttgatt

SEQ ID NO: 1184 - RNA, 19 nt, synthetic construct
  source 1..19: mol_type = other RNA
cctttgatggctttgattt

SEQ ID NO: 1185 - RNA, 19 nt, synthetic construct
  source 1..19: mol_type = other RNA
ctttgatggctttgatttt

SEQ ID NO: 1186 - RNA, 19 nt, synthetic construct
  source 1..19: mol_type = other RNA
tttgatggctttgattttg

SEQ ID NO: 1187 - RNA, 19 nt, synthetic construct
  source 1..19: mol_type = other RNA
ttgatggctttgattttgg

SEQ ID NO: 1188 - RNA, 19 nt, synthetic construct
  source 1..19: mol_type = other RNA
tgatggctttgattttggc

SEQ ID NO: 1189 - RNA, 19 nt, synthetic construct
  source 1..19: mol_type = other RNA
gatggctttgattttggcg

SEQ ID NO: 1190 - RNA, 19 nt, synthetic construct
  source 1..19: mol_type = other RNA
atggctttgattttggcga

SEQ ID NO: 1191 - RNA, 19 nt, synthetic construct
  source 1..19: mol_type = other RNA
tggctttgattttggcgat

SEQ ID NO: 1192 - RNA, 19 nt, synthetic construct
  source 1..19: mol_type = other RNA
ggctttgattttggcgatg

SEQ ID NO: 1193 - RNA, 19 nt, synthetic construct
  source 1..19: mol_type = other RNA
gctttgattttggcgatga

SEQ ID NO: 1194 - RNA, 19 nt, synthetic construct
  source 1..19: mol_type = other RNA
ctttgattttggcgatgat

SEQ ID NO: 1195 - RNA, 19 nt, synthetic construct
  source 1..19: mol_type = other RNA
tttgattttggcgatgatc

SEQ ID NO: 1196 - RNA, 19 nt, synthetic construct
  source 1..19: mol_type = other RNA
ttgattttggcgatgatcc

SEQ ID NO: 1197 - RNA, 19 nt, synthetic construct
  source 1..19: mol_type = other RNA
tgattttggcgatgatcct

SEQ ID NO: 1198 - RNA, 19 nt, synthetic construct
  source 1..19: mol_type = other RNA
gattttggcgatgatccta

SEQ ID NO: 1199 - RNA, 19 nt, synthetic construct
  source 1..19: mol_type = other RNA
attttggcgatgatcctag

SEQ ID NO: 1200 - RNA, 19 nt, synthetic construct
  source 1..19: mol_type = other RNA
ttttggcgatgatcctagt

SEQ ID NO: 1201 - RNA, 19 nt, synthetic construct
  source 1..19: mol_type = other RNA
tttggcgatgatcctagtg

SEQ ID NO: 1202 - RNA, 19 nt, synthetic construct
  source 1..19: mol_type = other RNA
ttggcgatgatcctagtga

SEQ ID NO: 1203 - RNA, 19 nt, synthetic construct
  source 1..19: mol_type = other RNA
tggcgatgatcctagtgac

SEQ ID NO: 1204 - RNA, 19 nt, synthetic construct
  source 1..19: mol_type = other RNA
ggcgatgatcctagtgaca

SEQ ID NO: 1205 - RNA, 19 nt, synthetic construct
  source 1..19: mol_type = other RNA
gcgatgatcctagtgacaa

SEQ ID NO: 1206 - RNA, 19 nt, synthetic construct
  source 1..19: mol_type = other RNA
cgatgatcctagtgacaag

SEQ ID NO: 1207 - RNA, 19 nt, synthetic construct
  source 1..19: mol_type = other RNA
gatgatcctagtgacaagt

SEQ ID NO: 1208 - RNA, 19 nt, synthetic construct
  source 1..19: mol_type = other RNA
atgatcctagtgacaagtt

SEQ ID NO: 1209 - RNA, 19 nt, synthetic construct
  source 1..19: mol_type = other RNA
tgatcctagtgacaagttt

SEQ ID NO: 1210 - RNA, 19 nt, synthetic construct
  source 1..19: mol_type = other RNA
gatcctagtgacaagtttt

SEQ ID NO: 1211 - RNA, 19 nt, synthetic construct
  source 1..19: mol_type = other RNA
atcctagtgacaagttttt

SEQ ID NO: 1212 - RNA, 19 nt, synthetic construct
  source 1..19: mol_type = other RNA
tcctagtgacaagtttttc

SEQ ID NO: 1213 - RNA, 19 nt, synthetic construct
  source 1..19: mol_type = other RNA
cctagtgacaagtttttca

SEQ ID NO: 1214 - RNA, 19 nt, synthetic construct
  source 1..19: mol_type = other RNA
ctagtgacaagtttttcac

SEQ ID NO: 1215 - RNA, 19 nt, synthetic construct
  source 1..19: mol_type = other RNA
tagtgacaagtttttcaca

SEQ ID NO: 1216 - RNA, 19 nt, synthetic construct
  source 1..19: mol_type = other RNA
agtgacaagtttttcacat

SEQ ID NO: 1217 - RNA, 19 nt, synthetic construct
  source 1..19: mol_type = other RNA
gtgacaagtttttcacatc

SEQ ID NO: 1218 - RNA, 19 nt, synthetic construct
  source 1..19: mol_type = other RNA
tgacaagtttttcacatcc

SEQ ID NO: 1219 - RNA, 19 nt, synthetic construct
  source 1..19: mol_type = other RNA
gacaagtttttcacatccc

SEQ ID NO: 1220 - RNA, 19 nt, synthetic construct
  source 1..19: mol_type = other RNA
acaagtttttcacatccca

SEQ ID NO: 1221 - RNA, 19 nt, synthetic construct
  source 1..19: mol_type = other RNA
caagtttttcacatcccat

SEQ ID NO: 1222 - RNA, 19 nt, synthetic construct
  source 1..19: mol_type = other RNA
aagtttttcacatcccata

SEQ ID NO: 1223 - RNA, 19 nt, synthetic construct
  source 1..19: mol_type = other RNA
agtttttcacatcccataa

SEQ ID NO: 1224 - RNA, 19 nt, synthetic construct
  source 1..19: mol_type = other RNA
gtttttcacatcccataat

SEQ ID NO: 1225 - RNA, 19 nt, synthetic construct
  source 1..19: mol_type = other RNA
tttttcacatcccataatg

SEQ ID NO: 1226 - RNA, 19 nt, synthetic construct
  source 1..19: mol_type = other RNA
ttttcacatcccataatgg

SEQ ID NO: 1227 - RNA, 19 nt, synthetic construct
  source 1..19: mol_type = other RNA
tttcacatcccataatggc

SEQ ID NO: 1228 - RNA, 19 nt, synthetic construct
  source 1..19: mol_type = other RNA
ttcacatcccataatggca

SEQ ID NO: 1229 - RNA, 19 nt, synthetic construct
  source 1..19: mol_type = other RNA
tcacatcccataatggcat

SEQ ID NO: 1230 - RNA, 19 nt, synthetic construct
  source 1..19: mol_type = other RNA
cacatcccataatggcatg

SEQ ID NO: 1231 - RNA, 19 nt, synthetic construct
  source 1..19: mol_type = other RNA
acatcccataatggcatgc

SEQ ID NO: 1232 - RNA, 19 nt, synthetic construct
  source 1..19: mol_type = other RNA
catcccataatggcatgca

SEQ ID NO: 1233 - RNA, 19 nt, synthetic construct
  source 1..19: mol_type = other RNA
atcccataatggcatgcag

SEQ ID NO: 1234 - RNA, 19 nt, synthetic construct
  source 1..19: mol_type = other RNA
tcccataatggcatgcagt

SEQ ID NO: 1235 - RNA, 19 nt, synthetic construct
  source 1..19: mol_type = other RNA
cccataatggcatgcagtt

SEQ ID NO: 1236 - RNA, 19 nt, synthetic construct
  source 1..19: mol_type = other RNA
ccataatggcatgcagttc

SEQ ID NO: 1237 - RNA, 19 nt, synthetic construct
  source 1..19: mol_type = other RNA
cataatggcatgcagttca

SEQ ID NO: 1238 - RNA, 19 nt, synthetic construct
  source 1..19: mol_type = other RNA
ataatggcatgcagttcag

SEQ ID NO: 1239 - RNA, 19 nt, synthetic construct
  source 1..19: mol_type = other RNA
taatggcatgcagttcagt

SEQ ID NO: 1240 - RNA, 19 nt, synthetic construct
  source 1..19: mol_type = other RNA
aatggcatgcagttcagta

SEQ ID NO: 1241 - RNA, 19 nt, synthetic construct
  source 1..19: mol_type = other RNA
atggcatgcagttcagtac

SEQ ID NO: 1242 - RNA, 19 nt, synthetic construct
  source 1..19: mol_type = other RNA
tggcatgcagttcagtacc

SEQ ID NO: 1243 - RNA, 19 nt, synthetic construct
  source 1..19: mol_type = other RNA
ggcatgcagttcagtacct

SEQ ID NO: 1244 - RNA, 19 nt, synthetic construct
  source 1..19: mol_type = other RNA
gcatgcagttcagtacctg

SEQ ID NO: 1245 - RNA, 19 nt, synthetic construct
  source 1..19: mol_type = other RNA
catgcagttcagtacctgg

SEQ ID NO: 1246 - RNA, 19 nt, synthetic construct
  source 1..19: mol_type = other RNA
atgcagttcagtacctggg

SEQ ID NO: 1247 - RNA, 19 nt, synthetic construct
  source 1..19: mol_type = other RNA
tgcagttcagtacctggga

SEQ ID NO: 1248 - RNA, 19 nt, synthetic construct
  source 1..19: mol_type = other RNA
gcagttcagtacctgggac

SEQ ID NO: 1249 - RNA, 19 nt, synthetic construct
  source 1..19: mol_type = other RNA
cagttcagtacctgggaca

SEQ ID NO: 1250 - RNA, 19 nt, synthetic construct
  source 1..19: mol_type = other RNA
agttcagtacctgggacaa

SEQ ID NO: 1251 - RNA, 19 nt, synthetic construct
  source 1..19: mol_type = other RNA
gttcagtacctgggacaat

SEQ ID NO: 1252 - RNA, 19 nt, synthetic construct
  source 1..19: mol_type = other RNA
ttcagtacctgggacaatg

SEQ ID NO: 1253 - RNA, 19 nt, synthetic construct
  source 1..19: mol_type = other RNA
tcagtacctgggacaatga

SEQ ID NO: 1254 - RNA, 19 nt, synthetic construct
  source 1..19: mol_type = other RNA
cagtacctgggacaatgac

SEQ ID NO: 1255 - RNA, 19 nt, synthetic construct
  source 1..19: mol_type = other RNA
agtacctgggacaatgaca

SEQ ID NO: 1256 - RNA, 19 nt, synthetic construct
  source 1..19: mol_type = other RNA
gtacctgggacaatgacaa

SEQ ID NO: 1257 - RNA, 19 nt, synthetic construct
  source 1..19: mol_type = other RNA
tacctgggacaatgacaat

SEQ ID NO: 1258 - RNA, 19 nt, synthetic construct
  source 1..19: mol_type = other RNA
acctgggacaatgacaatg

SEQ ID NO: 1259 - RNA, 19 nt, synthetic construct
  source 1..19: mol_type = other RNA
cctgggacaatgacaatga

SEQ ID NO: 1260 - RNA, 19 nt, synthetic construct
  source 1..19: mol_type = other RNA
ctgggacaatgacaatgat

SEQ ID NO: 1261 - RNA, 19 nt, synthetic construct
  source 1..19: mol_type = other RNA
tgggacaatgacaatgata

SEQ ID NO: 1262 - RNA, 19 nt, synthetic construct
  source 1..19: mol_type = other RNA
gggacaatgacaatgataa

SEQ ID NO: 1263 - RNA, 19 nt, synthetic construct
  source 1..19: mol_type = other RNA
ggacaatgacaatgataag

SEQ ID NO: 1264 - RNA, 19 nt, synthetic construct
  source 1..19: mol_type = other RNA
gacaatgacaatgataagt

SEQ ID NO: 1265 - RNA, 19 nt, synthetic construct
  source 1..19: mol_type = other RNA
acaatgacaatgataagtt

SEQ ID NO: 1266 - RNA, 19 nt, synthetic construct
  source 1..19: mol_type = other RNA
caatgacaatgataagttt

SEQ ID NO: 1267 - RNA, 19 nt, synthetic construct
  source 1..19: mol_type = other RNA
aatgacaatgataagtttg

SEQ ID NO: 1268 - RNA, 19 nt, synthetic construct
  source 1..19: mol_type = other RNA
atgacaatgataagtttga

SEQ ID NO: 1269 - RNA, 19 nt, synthetic construct
  source 1..19: mol_type = other RNA
tgacaatgataagtttgaa

SEQ ID NO: 1270 - RNA, 19 nt, synthetic construct
  source 1..19: mol_type = other RNA
gacaatgataagtttgaag

SEQ ID NO: 1271 - RNA, 19 nt, synthetic construct
  source 1..19: mol_type = other RNA
acaatgataagtttgaagg

SEQ ID NO: 1272 - RNA, 19 nt, synthetic construct
  source 1..19: mol_type = other RNA
caatgataagtttgaaggc

SEQ ID NO: 1273 - RNA, 19 nt, synthetic construct
  source 1..19: mol_type = other RNA
aatgataagtttgaaggca

SEQ ID NO: 1274 - RNA, 19 nt, synthetic construct
  source 1..19: mol_type = other RNA
atgataagtttgaaggcaa

SEQ ID NO: 1275 - RNA, 19 nt, synthetic construct
  source 1..19: mol_type = other RNA
tgataagtttgaaggcaac

SEQ ID NO: 1276 - RNA, 19 nt, synthetic construct
  source 1..19: mol_type = other RNA
gataagtttgaaggcaact

SEQ ID NO: 1277 - RNA, 19 nt, synthetic construct
  source 1..19: mol_type = other RNA
ataagtttgaaggcaactg

SEQ ID NO: 1278 - RNA, 19 nt, synthetic construct
  source 1..19: mol_type = other RNA
taagtttgaaggcaactgt

SEQ ID NO: 1279 - RNA, 19 nt, synthetic construct
  source 1..19: mol_type = other RNA
aagtttgaaggcaactgtg

SEQ ID NO: 1280 - RNA, 19 nt, synthetic construct
  source 1..19: mol_type = other RNA
agtttgaaggcaactgtgc

SEQ ID NO: 1281 - RNA, 19 nt, synthetic construct
  source 1..19: mol_type = other RNA
gtttgaaggcaactgtgct

SEQ ID NO: 1282 - RNA, 19 nt, synthetic construct
  source 1..19: mol_type = other RNA
tttgaaggcaactgtgctg

SEQ ID NO: 1283 - RNA, 19 nt, synthetic construct
  source 1..19: mol_type = other RNA
ttgaaggcaactgtgctga

SEQ ID NO: 1284 - RNA, 19 nt, synthetic construct
  source 1..19: mol_type = other RNA
tgaaggcaactgtgctgaa

SEQ ID NO: 1285 - RNA, 19 nt, synthetic construct
  source 1..19: mol_type = other RNA
gaaggcaactgtgctgaac

SEQ ID NO: 1286 - RNA, 19 nt, synthetic construct
  source 1..19: mol_type = other RNA
aaggcaactgtgctgaaca

SEQ ID NO: 1287 - RNA, 19 nt, synthetic construct
  source 1..19: mol_type = other RNA
aggcaactgtgctgaacag

SEQ ID NO: 1288 - RNA, 19 nt, synthetic construct
  source 1..19: mol_type = other RNA
ggcaactgtgctgaacagg

SEQ ID NO: 1289 - RNA, 19 nt, synthetic construct
  source 1..19: mol_type = other RNA
gcaactgtgctgaacagga

SEQ ID NO: 1290 - RNA, 19 nt, synthetic construct
  source 1..19: mol_type = other RNA
caactgtgctgaacaggat

SEQ ID NO: 1291 - RNA, 19 nt, synthetic construct
  source 1..19: mol_type = other RNA
aactgtgctgaacaggatg

SEQ ID NO: 1292 - RNA, 19 nt, synthetic construct
  source 1..19: mol_type = other RNA
actgtgctgaacaggatgg

SEQ ID NO: 1293 - RNA, 19 nt, synthetic construct
  source 1..19: mol_type = other RNA
ctgtgctgaacaggatgga

SEQ ID NO: 1294 - RNA, 19 nt, synthetic construct
  source 1..19: mol_type = other RNA
tgtgctgaacaggatggat

SEQ ID NO: 1295 - RNA, 19 nt, synthetic construct
  source 1..19: mol_type = other RNA
gtgctgaacaggatggatc

SEQ ID NO: 1296 - RNA, 19 nt, synthetic construct
  source 1..19: mol_type = other RNA
tgctgaacaggatggatct

SEQ ID NO: 1297 - RNA, 19 nt, synthetic construct
  source 1..19: mol_type = other RNA
gctgaacaggatggatctg

SEQ ID NO: 1298 - RNA, 19 nt, synthetic construct
  source 1..19: mol_type = other RNA
ctgaacaggatggatctgg

SEQ ID NO: 1299 - RNA, 19 nt, synthetic construct
  source 1..19: mol_type = other RNA
tgaacaggatggatctggt

SEQ ID NO: 1300 - RNA, 19 nt, synthetic construct
  source 1..19: mol_type = other RNA
gaacaggatggatctggtt

SEQ ID NO: 1301 - RNA, 19 nt, synthetic construct
  source 1..19: mol_type = other RNA
aacaggatggatctggttg

SEQ ID NO: 1302 - RNA, 19 nt, synthetic construct
  source 1..19: mol_type = other RNA
acaggatggatctggttgg

SEQ ID NO: 1303 - RNA, 19 nt, synthetic construct
  source 1..19: mol_type = other RNA
caggatggatctggttggt

SEQ ID NO: 1304 - RNA, 19 nt, synthetic construct
  source 1..19: mol_type = other RNA
aggatggatctggttggtg

SEQ ID NO: 1305 - RNA, 19 nt, synthetic construct
  source 1..19: mol_type = other RNA
ggatggatctggttggtgg

SEQ ID NO: 1306 - RNA, 19 nt, synthetic construct
  source 1..19: mol_type = other RNA
gatggatctggttggtgga

SEQ ID NO: 1307 - RNA, 19 nt, synthetic construct
  source 1..19: mol_type = other RNA
atggatctggttggtggat

SEQ ID NO: 1308 - RNA, 19 nt, synthetic construct
  source 1..19: mol_type = other RNA
tggatctggttggtggatg

SEQ ID NO: 1309 - RNA, 19 nt, synthetic construct
  source 1..19: mol_type = other RNA
ggatctggttggtggatga

SEQ ID NO: 1310 - RNA, 19 nt, synthetic construct
  source 1..19: mol_type = other RNA
gatctggttggtggatgaa

SEQ ID NO: 1311 - RNA, 19 nt, synthetic construct
  source 1..19: mol_type = other RNA
atctggttggtggatgaac

SEQ ID NO: 1312 - RNA, 19 nt, synthetic construct
  source 1..19: mol_type = other RNA
tctggttggtggatgaaca

SEQ ID NO: 1313 - RNA, 19 nt, synthetic construct
  source 1..19: mol_type = other RNA
ctggttggtggatgaacaa

SEQ ID NO: 1314 - RNA, 19 nt, synthetic construct
  source 1..19: mol_type = other RNA
tggttggtggatgaacaag

SEQ ID NO: 1315 - RNA, 19 nt, synthetic construct
  source 1..19: mol_type = other RNA
ggttggtggatgaacaagt

SEQ ID NO: 1316 - RNA, 19 nt, synthetic construct
  source 1..19: mol_type = other RNA
gttggtggatgaacaagtg

SEQ ID NO: 1317 - RNA, 19 nt, synthetic construct
  source 1..19: mol_type = other RNA
ttggtggatgaacaagtgt

SEQ ID NO: 1318 - RNA, 19 nt, synthetic construct
  source 1..19: mol_type = other RNA
tggtggatgaacaagtgtc

SEQ ID NO: 1319 - RNA, 19 nt, synthetic construct
  source 1..19: mol_type = other RNA
ggtggatgaacaagtgtca

SEQ ID NO: 1320 - RNA, 19 nt, synthetic construct
  source 1..19: mol_type = other RNA
gtggatgaacaagtgtcac

SEQ ID NO: 1321 - RNA, 19 nt, synthetic construct
  source 1..19: mol_type = other RNA
tggatgaacaagtgtcacg

SEQ ID NO: 1322 - RNA, 19 nt, synthetic construct
  source 1..19: mol_type = other RNA
ggatgaacaagtgtcacgc

SEQ ID NO: 1323 - RNA, 19 nt, synthetic construct
  source 1..19: mol_type = other RNA
gatgaacaagtgtcacgct

SEQ ID NO: 1324 - RNA, 19 nt, synthetic construct
  source 1..19: mol_type = other RNA
atgaacaagtgtcacgctg

SEQ ID NO: 1325 - RNA, 19 nt, synthetic construct
  source 1..19: mol_type = other RNA
tgaacaagtgtcacgctgg

SEQ ID NO: 1326 - RNA, 19 nt, synthetic construct
  source 1..19: mol_type = other RNA
gaacaagtgtcacgctggc

SEQ ID NO: 1327 - RNA, 19 nt, synthetic construct
  source 1..19: mol_type = other RNA
aacaagtgtcacgctggcc

SEQ ID NO: 1328 - RNA, 19 nt, synthetic construct
  source 1..19: mol_type = other RNA
acaagtgtcacgctggcca

SEQ ID NO: 1329 - RNA, 19 nt, synthetic construct
  source 1..19: mol_type = other RNA
caagtgtcacgctggccat

SEQ ID NO: 1330 - RNA, 19 nt, synthetic construct
  source 1..19: mol_type = other RNA
aagtgtcacgctggccatc

SEQ ID NO: 1331 - RNA, 19 nt, synthetic construct
  source 1..19: mol_type = other RNA
agtgtcacgctggccatct

SEQ ID NO: 1332 - RNA, 19 nt, synthetic construct
  source 1..19: mol_type = other RNA
gtgtcacgctggccatctc

SEQ ID NO: 1333 - RNA, 19 nt, synthetic construct
  source 1..19: mol_type = other RNA
tgtcacgctggccatctca

SEQ ID NO: 1334 - RNA, 19 nt, synthetic construct
  source 1..19: mol_type = other RNA
gtcacgctggccatctcaa

SEQ ID NO: 1335 - RNA, 19 nt, synthetic construct
  source 1..19: mol_type = other RNA
tcacgctggccatctcaat

SEQ ID NO: 1336 - RNA, 19 nt, synthetic construct
  source 1..19: mol_type = other RNA
cacgctggccatctcaatg

SEQ ID NO: 1337 - RNA, 19 nt, synthetic construct
  source 1..19: mol_type = other RNA
acgctggccatctcaatgg

SEQ ID NO: 1338 - RNA, 19 nt, synthetic construct
  source 1..19: mol_type = other RNA
cgctggccatctcaatgga

SEQ ID NO: 1339 - RNA, 19 nt, synthetic construct
  source 1..19: mol_type = other RNA
gctggccatctcaatggag

SEQ ID NO: 1340 - RNA, 19 nt, synthetic construct
  source 1..19: mol_type = other RNA
ctggccatctcaatggagt

SEQ ID NO: 1341 - RNA, 19 nt, synthetic construct
  source 1..19: mol_type = other RNA
tggccatctcaatggagtt

SEQ ID NO: 1342 - RNA, 19 nt, synthetic construct
  source 1..19: mol_type = other RNA
ggccatctcaatggagttt

SEQ ID NO: 1343 - RNA, 19 nt, synthetic construct
  source 1..19: mol_type = other RNA
gccatctcaatggagttta

SEQ ID NO: 1344 - RNA, 19 nt, synthetic construct
  source 1..19: mol_type = other RNA
ccatctcaatggagtttat

SEQ ID NO: 1345 - RNA, 19 nt, synthetic construct
  source 1..19: mol_type = other RNA
catctcaatggagtttatt

SEQ ID NO: 1346 - RNA, 19 nt, synthetic construct
  source 1..19: mol_type = other RNA
atctcaatggagtttatta

SEQ ID NO: 1347 - RNA, 19 nt, synthetic construct
  source 1..19: mol_type = other RNA
tctcaatggagtttattac

SEQ ID NO: 1348 - RNA, 19 nt, synthetic construct
  source 1..19: mol_type = other RNA
ctcaatggagtttattacc

SEQ ID NO: 1349 - RNA, 19 nt, synthetic construct
  source 1..19: mol_type = other RNA
tcaatggagtttattacca

SEQ ID NO: 1350 - RNA, 19 nt, synthetic construct
  source 1..19: mol_type = other RNA
caatggagtttattaccaa

SEQ ID NO: 1351 - RNA, 19 nt, synthetic construct
  source 1..19: mol_type = other RNA
aatggagtttattaccaag

SEQ ID NO: 1352 - RNA, 19 nt, synthetic construct
  source 1..19: mol_type = other RNA
atggagtttattaccaagg

SEQ ID NO: 1353 - RNA, 19 nt, synthetic construct
  source 1..19: mol_type = other RNA
tggagtttattaccaaggt

SEQ ID NO: 1354 - RNA, 19 nt, synthetic construct
  source 1..19: mol_type = other RNA
ggagtttattaccaaggtg

SEQ ID NO: 1355 - RNA, 19 nt, synthetic construct
  source 1..19: mol_type = other RNA
gagtttattaccaaggtgg

SEQ ID NO: 1356 - RNA, 19 nt, synthetic construct
  source 1..19: mol_type = other RNA
agtttattaccaaggtggc

SEQ ID NO: 1357 - RNA, 19 nt, synthetic construct
  source 1..19: mol_type = other RNA
gtttattaccaaggtggca

SEQ ID NO: 1358 - RNA, 19 nt, synthetic construct
  source 1..19: mol_type = other RNA
tttattaccaaggtggcac

SEQ ID NO: 1359 - RNA, 19 nt, synthetic construct
  source 1..19: mol_type = other RNA
ttattaccaaggtggcact

SEQ ID NO: 1360 - RNA, 19 nt, synthetic construct
  source 1..19: mol_type = other RNA
tattaccaaggtggcactt

SEQ ID NO: 1361 - RNA, 19 nt, synthetic construct
  source 1..19: mol_type = other RNA
attaccaaggtggcactta

SEQ ID NO: 1362 - RNA, 19 nt, synthetic construct
  source 1..19: mol_type = other RNA
ttaccaaggtggcacttac

SEQ ID NO: 1363 - RNA, 19 nt, synthetic construct
  source 1..19: mol_type = other RNA
taccaaggtggcacttact

SEQ ID NO: 1364 - RNA, 19 nt, synthetic construct
  source 1..19: mol_type = other RNA
accaaggtggcacttactc

SEQ ID NO: 1365 - RNA, 19 nt, synthetic construct
  source 1..19: mol_type = other RNA
ccaaggtggcacttactca

SEQ ID NO: 1366 - RNA, 19 nt, synthetic construct
  source 1..19: mol_type = other RNA
caaggtggcacttactcaa

SEQ ID NO: 1367 - RNA, 19 nt, synthetic construct
  source 1..19: mol_type = other RNA
aaggtggcacttactcaaa

SEQ ID NO: 1368 - RNA, 19 nt, synthetic construct
  source 1..19: mol_type = other RNA
aggtggcacttactcaaaa

SEQ ID NO: 1369 - RNA, 19 nt, synthetic construct
  source 1..19: mol_type = other RNA
ggtggcacttactcaaaag

SEQ ID NO: 1370 - RNA, 19 nt, synthetic construct
  source 1..19: mol_type = other RNA
gtggcacttactcaaaagc

SEQ ID NO: 1371 - RNA, 19 nt, synthetic construct
  source 1..19: mol_type = other RNA
tggcacttactcaaaagca

SEQ ID NO: 1372 - RNA, 19 nt, synthetic construct
  source 1..19: mol_type = other RNA
ggcacttactcaaaagcat

SEQ ID NO: 1373 - RNA, 19 nt, synthetic construct
  source 1..19: mol_type = other RNA
gcacttactcaaaagcatc

SEQ ID NO: 1374 - RNA, 19 nt, synthetic construct
  source 1..19: mol_type = other RNA
cacttactcaaaagcatct

SEQ ID NO: 1375 - RNA, 19 nt, synthetic construct
  source 1..19: mol_type = other RNA
acttactcaaaagcatcta

SEQ ID NO: 1376 - RNA, 19 nt, synthetic construct
  source 1..19: mol_type = other RNA
cttactcaaaagcatctac

SEQ ID NO: 1377 - RNA, 19 nt, synthetic construct
  source 1..19: mol_type = other RNA
ttactcaaaagcatctact

SEQ ID NO: 1378 - RNA, 19 nt, synthetic construct
  source 1..19: mol_type = other RNA
tactcaaaagcatctactc

SEQ ID NO: 1379 - RNA, 19 nt, synthetic construct
  source 1..19: mol_type = other RNA
actcaaaagcatctactcc

SEQ ID NO: 1380 - RNA, 19 nt, synthetic construct
  source 1..19: mol_type = other RNA
ctcaaaagcatctactcct

SEQ ID NO: 1381 - RNA, 19 nt, synthetic construct
  source 1..19: mol_type = other RNA
tcaaaagcatctactccta

SEQ ID NO: 1382 - RNA, 19 nt, synthetic construct
  source 1..19: mol_type = other RNA
caaaagcatctactcctaa

SEQ ID NO: 1383 - RNA, 19 nt, synthetic construct
  source 1..19: mol_type = other RNA
aaaagcatctactcctaat

SEQ ID NO: 1384 - RNA, 19 nt, synthetic construct
  source 1..19: mol_type = other RNA
aaagcatctactcctaatg

SEQ ID NO: 1385 - RNA, 19 nt, synthetic construct
  source 1..19: mol_type = other RNA
aagcatctactcctaatgg

SEQ ID NO: 1386 - RNA, 19 nt, synthetic construct
  source 1..19: mol_type = other RNA
agcatctactcctaatggt

SEQ ID NO: 1387 - RNA, 19 nt, synthetic construct
  source 1..19: mol_type = other RNA
gcatctactcctaatggtt

SEQ ID NO: 1388 - RNA, 19 nt, synthetic construct
  source 1..19: mol_type = other RNA
catctactcctaatggtta

SEQ ID NO: 1389 - RNA, 19 nt, synthetic construct
  source 1..19: mol_type = other RNA
atctactcctaatggttat

SEQ ID NO: 1390 - RNA, 19 nt, synthetic construct
  source 1..19: mol_type = other RNA
tctactcctaatggttatg

SEQ ID NO: 1391 - RNA, 19 nt, synthetic construct
  source 1..19: mol_type = other RNA
ctactcctaatggttatga

SEQ ID NO: 1392 - RNA, 19 nt, synthetic construct
  source 1..19: mol_type = other RNA
tactcctaatggttatgat

SEQ ID NO: 1393 - RNA, 19 nt, synthetic construct
  source 1..19: mol_type = other RNA
actcctaatggttatgata

SEQ ID NO: 1394 - RNA, 19 nt, synthetic construct
  source 1..19: mol_type = other RNA
ctcctaatggttatgataa

SEQ ID NO: 1395 - RNA, 19 nt, synthetic construct
  source 1..19: mol_type = other RNA
tcctaatggttatgataat

SEQ ID NO: 1396 - RNA, 19 nt, synthetic construct
  source 1..19: mol_type = other RNA
cctaatggttatgataatg

SEQ ID NO: 1397 - RNA, 19 nt, synthetic construct
  source 1..19: mol_type = other RNA
ctaatggttatgataatgg

SEQ ID NO: 1398 - RNA, 19 nt, synthetic construct
  source 1..19: mol_type = other RNA
taatggttatgataatggc

SEQ ID NO: 1399 - RNA, 19 nt, synthetic construct
  source 1..19: mol_type = other RNA
aatggttatgataatggca

SEQ ID NO: 1400 - RNA, 19 nt, synthetic construct
  source 1..19: mol_type = other RNA
atggttatgataatggcat

SEQ ID NO: 1401 - RNA, 19 nt, synthetic construct
  source 1..19: mol_type = other RNA
tggttatgataatggcatt

SEQ ID NO: 1402 - RNA, 19 nt, synthetic construct
  source 1..19: mol_type = other RNA
ggttatgataatggcatta

SEQ ID NO: 1403 - RNA, 19 nt, synthetic construct
  source 1..19: mol_type = other RNA
gttatgataatggcattat

SEQ ID NO: 1404 - RNA, 19 nt, synthetic construct
  source 1..19: mol_type = other RNA
ttatgataatggcattatt

SEQ ID NO: 1405 - RNA, 19 nt, synthetic construct
  source 1..19: mol_type = other RNA
tatgataatggcattattt

SEQ ID NO: 1406 - RNA, 19 nt, synthetic construct
  source 1..19: mol_type = other RNA
atgataatggcattatttg

SEQ ID NO: 1407 - RNA, 19 nt, synthetic construct
  source 1..19: mol_type = other RNA
tgataatggcattatttgg

SEQ ID NO: 1408 - RNA, 19 nt, synthetic construct
  source 1..19: mol_type = other RNA
gataatggcattatttggg

SEQ ID NO: 1409 - RNA, 19 nt, synthetic construct
  source 1..19: mol_type = other RNA
ataatggcattatttgggc

SEQ ID NO: 1410 - RNA, 19 nt, synthetic construct
  source 1..19: mol_type = other RNA
taatggcattatttgggcc

SEQ ID NO: 1411 - RNA, 19 nt, synthetic construct
  source 1..19: mol_type = other RNA
aatggcattatttgggcca

SEQ ID NO: 1412 - RNA, 19 nt, synthetic construct
  source 1..19: mol_type = other RNA
atggcattatttgggccac

SEQ ID NO: 1413 - RNA, 19 nt, synthetic construct
  source 1..19: mol_type = other RNA
tggcattatttgggccact

SEQ ID NO: 1414 - RNA, 19 nt, synthetic construct
  source 1..19: mol_type = other RNA
ggcattatttgggccactt

SEQ ID NO: 1415 - RNA, 19 nt, synthetic construct
  source 1..19: mol_type = other RNA
gcattatttgggccacttg

SEQ ID NO: 1416 - RNA, 19 nt, synthetic construct
  source 1..19: mol_type = other RNA
cattatttgggccacttgg

SEQ ID NO: 1417 - RNA, 19 nt, synthetic construct
  source 1..19: mol_type = other RNA
attatttgggccacttgga

SEQ ID NO: 1418 - RNA, 19 nt, synthetic construct
  source 1..19: mol_type = other RNA
ttatttgggccacttggaa

SEQ ID NO: 1419 - RNA, 19 nt, synthetic construct
  source 1..19: mol_type = other RNA
tatttgggccacttggaaa

SEQ ID NO: 1420 - RNA, 19 nt, synthetic construct
  source 1..19: mol_type = other RNA
atttgggccacttggaaaa

SEQ ID NO: 1421 - RNA, 19 nt, synthetic construct
  source 1..19: mol_type = other RNA
tttgggccacttggaaaac

SEQ ID NO: 1422 - RNA, 19 nt, synthetic construct
  source 1..19: mol_type = other RNA
ttgggccacttggaaaacc

SEQ ID NO: 1423 - RNA, 19 nt, synthetic construct
  source 1..19: mol_type = other RNA
tgggccacttggaaaaccc

SEQ ID NO: 1424 - RNA, 19 nt, synthetic construct
  source 1..19: mol_type = other RNA
gggccacttggaaaacccg

SEQ ID NO: 1425 - RNA, 19 nt, synthetic construct
  source 1..19: mol_type = other RNA
ggccacttggaaaacccgg

SEQ ID NO: 1426 - RNA, 19 nt, synthetic construct
  source 1..19: mol_type = other RNA
gccacttggaaaacccggt

SEQ ID NO: 1427 - RNA, 19 nt, synthetic construct
  source 1..19: mol_type = other RNA
ccacttggaaaacccggtg

SEQ ID NO: 1428 - RNA, 19 nt, synthetic construct
  source 1..19: mol_type = other RNA
cacttggaaaacccggtgg

SEQ ID NO: 1429 - RNA, 19 nt, synthetic construct
  source 1..19: mol_type = other RNA
acttggaaaacccggtggt

SEQ ID NO: 1430 - RNA, 19 nt, synthetic construct
  source 1..19: mol_type = other RNA
cttggaaaacccggtggta

SEQ ID NO: 1431 - RNA, 19 nt, synthetic construct
  source 1..19: mol_type = other RNA
ttggaaaacccggtggtat

SEQ ID NO: 1432 - RNA, 19 nt, synthetic construct
  source 1..19: mol_type = other RNA
tggaaaacccggtggtatt

SEQ ID NO: 1433 - RNA, 19 nt, synthetic construct
  source 1..19: mol_type = other RNA
ggaaaacccggtggtattc

SEQ ID NO: 1434 - RNA, 19 nt, synthetic construct
  source 1..19: mol_type = other RNA
gaaaacccggtggtattcc

SEQ ID NO: 1435 - RNA, 19 nt, synthetic construct
  source 1..19: mol_type = other RNA
aaaacccggtggtattcca

SEQ ID NO: 1436 - RNA, 19 nt, synthetic construct
  source 1..19: mol_type = other RNA
aaacccggtggtattccat

SEQ ID NO: 1437 - RNA, 19 nt, synthetic construct
  source 1..19: mol_type = other RNA
aacccggtggtattccatg

SEQ ID NO: 1438 - RNA, 19 nt, synthetic construct
  source 1..19: mol_type = other RNA
acccggtggtattccatga

SEQ ID NO: 1439 - RNA, 19 nt, synthetic construct
  source 1..19: mol_type = other RNA
cccggtggtattccatgaa

SEQ ID NO: 1440 - RNA, 19 nt, synthetic construct
  source 1..19: mol_type = other RNA
ccggtggtattccatgaag

SEQ ID NO: 1441 - RNA, 19 nt, synthetic construct
  source 1..19: mol_type = other RNA
cggtggtattccatgaaga

SEQ ID NO: 1442 - RNA, 19 nt, synthetic construct
  source 1..19: mol_type = other RNA
ggtggtattccatgaagaa

SEQ ID NO: 1443 - RNA, 19 nt, synthetic construct
  source 1..19: mol_type = other RNA
gtggtattccatgaagaaa

SEQ ID NO: 1444 - RNA, 19 nt, synthetic construct
  source 1..19: mol_type = other RNA
tggtattccatgaagaaaa

SEQ ID NO: 1445 - RNA, 19 nt, synthetic construct
  source 1..19: mol_type = other RNA
ggtattccatgaagaaaac

SEQ ID NO: 1446 - RNA, 19 nt, synthetic construct
  source 1..19: mol_type = other RNA
gtattccatgaagaaaacc

SEQ ID NO: 1447 - RNA, 19 nt, synthetic construct
  source 1..19: mol_type = other RNA
tattccatgaagaaaacca

SEQ ID NO: 1448 - RNA, 19 nt, synthetic construct
  source 1..19: mol_type = other RNA
attccatgaagaaaaccac

SEQ ID NO: 1449 - RNA, 19 nt, synthetic construct
  source 1..19: mol_type = other RNA
ttccatgaagaaaaccact

SEQ ID NO: 1450 - RNA, 19 nt, synthetic construct
  source 1..19: mol_type = other RNA
tccatgaagaaaaccacta

SEQ ID NO: 1451 - RNA, 19 nt, synthetic construct
  source 1..19: mol_type = other RNA
ccatgaagaaaaccactat

SEQ ID NO: 1452 - RNA, 19 nt, synthetic construct
  source 1..19: mol_type = other RNA
catgaagaaaaccactatg

SEQ ID NO: 1453 - RNA, 19 nt, synthetic construct
  source 1..19: mol_type = other RNA
atgaagaaaaccactatga

SEQ ID NO: 1454 - RNA, 19 nt, synthetic construct
  source 1..19: mol_type = other RNA
tgaagaaaaccactatgaa

SEQ ID NO: 1455 - RNA, 19 nt, synthetic construct
  source 1..19: mol_type = other RNA
gaagaaaaccactatgaag

SEQ ID NO: 1456 - RNA, 19 nt, synthetic construct
  source 1..19: mol_type = other RNA
aagaaaaccactatgaaga

SEQ ID NO: 1457 - RNA, 19 nt, synthetic construct
  source 1..19: mol_type = other RNA
agaaaaccactatgaagat

SEQ ID NO: 1458 - RNA, 19 nt, synthetic construct
  source 1..19: mol_type = other RNA
gaaaaccactatgaagata

SEQ ID NO: 1459 - RNA, 19 nt, synthetic construct
  source 1..19: mol_type = other RNA
aaaaccactatgaagataa

SEQ ID NO: 1460 - RNA, 19 nt, synthetic construct
  source 1..19: mol_type = other RNA
aaaccactatgaagataat

SEQ ID NO: 1461 - RNA, 19 nt, synthetic construct
  source 1..19: mol_type = other RNA
aaccactatgaagataatc

SEQ ID NO: 1462 - RNA, 19 nt, synthetic construct
  source 1..19: mol_type = other RNA
accactatgaagataatcc

SEQ ID NO: 1463 - RNA, 19 nt, synthetic construct
  source 1..19: mol_type = other RNA
ccactatgaagataatccc

SEQ ID NO: 1464 - RNA, 19 nt, synthetic construct
  source 1..19: mol_type = other RNA
cactatgaagataatccca

SEQ ID NO: 1465 - RNA, 19 nt, synthetic construct
  source 1..19: mol_type = other RNA
actatgaagataatcccat

SEQ ID NO: 1466 - RNA, 19 nt, synthetic construct
  source 1..19: mol_type = other RNA
ctatgaagataatcccatt

SEQ ID NO: 1467 - RNA, 19 nt, synthetic construct
  source 1..19: mol_type = other RNA
tatgaagataatcccattc

SEQ ID NO: 1468 - RNA, 19 nt, synthetic construct
  source 1..19: mol_type = other RNA
atgaagataatcccattca

SEQ ID NO: 1469 - RNA, 19 nt, synthetic construct
  source 1..19: mol_type = other RNA
tgaagataatcccattcaa

SEQ ID NO: 1470 - RNA, 19 nt, synthetic construct
  source 1..19: mol_type = other RNA
gaagataatcccattcaac

SEQ ID NO: 1471 - RNA, 19 nt, synthetic construct
  source 1..19: mol_type = other RNA
aagataatcccattcaaca

SEQ ID NO: 1472 - RNA, 19 nt, synthetic construct
  source 1..19: mol_type = other RNA
agataatcccattcaacag

SEQ ID NO: 1473 - RNA, 19 nt, synthetic construct
  source 1..19: mol_type = other RNA
gataatcccattcaacaga

SEQ ID NO: 1474 - RNA, 19 nt, synthetic construct
  source 1..19: mol_type = other RNA
ataatcccattcaacagac

SEQ ID NO: 1475 - RNA, 19 nt, synthetic construct
  source 1..19: mol_type = other RNA
taatcccattcaacagact

SEQ ID NO: 1476 - RNA, 19 nt, synthetic construct
  source 1..19: mol_type = other RNA
aatcccattcaacagactc

SEQ ID NO: 1477 - RNA, 19 nt, synthetic construct
  source 1..19: mol_type = other RNA
atcccattcaacagactca

SEQ ID NO: 1478 - RNA, 19 nt, synthetic construct
  source 1..19: mol_type = other RNA
tcccattcaacagactcac

SEQ ID NO: 1479 - RNA, 19 nt, synthetic construct
  source 1..19: mol_type = other RNA
cccattcaacagactcaca

SEQ ID NO: 1480 - RNA, 19 nt, synthetic construct
  source 1..19: mol_type = other RNA
ccattcaacagactcacaa

SEQ ID NO: 1481 - RNA, 19 nt, synthetic construct
  source 1..19: mol_type = other RNA
cattcaacagactcacaat

SEQ ID NO: 1482 - RNA, 19 nt, synthetic construct
  source 1..19: mol_type = other RNA
attcaacagactcacaatt

SEQ ID NO: 1483 - RNA, 19 nt, synthetic construct
  source 1..19: mol_type = other RNA
ttcaacagactcacaattg

SEQ ID NO: 1484 - RNA, 19 nt, synthetic construct
  source 1..19: mol_type = other RNA
tcaacagactcacaattgg

SEQ ID NO: 1485 - RNA, 19 nt, synthetic construct
  source 1..19: mol_type = other RNA
caacagactcacaattgga

SEQ ID NO: 1486 - RNA, 19 nt, synthetic construct
  source 1..19: mol_type = other RNA
aacagactcacaattggag

SEQ ID NO: 1487 - RNA, 19 nt, synthetic construct
  source 1..19: mol_type = other RNA
acagactcacaattggaga

SEQ ID NO: 1488 - RNA, 19 nt, synthetic construct
  source 1..19: mol_type = other RNA
cagactcacaattggagaa

SEQ ID NO: 1489 - RNA, 19 nt, synthetic construct
  source 1..19: mol_type = other RNA
agactcacaattggagaag

SEQ ID NO: 1490 - RNA, 19 nt, synthetic construct
  source 1..19: mol_type = other RNA
gactcacaattggagaagg

SEQ ID NO: 1491 - RNA, 19 nt, synthetic construct
  source 1..19: mol_type = other RNA
actcacaattggagaagga

SEQ ID NO: 1492 - RNA, 19 nt, synthetic construct
  source 1..19: mol_type = other RNA
ctcacaattggagaaggac

SEQ ID NO: 1493 - RNA, 19 nt, synthetic construct
  source 1..19: mol_type = other RNA
tcacaattggagaaggaca

SEQ ID NO: 1494 - RNA, 19 nt, synthetic construct
  source 1..19: mol_type = other RNA
cacaattggagaaggacag

SEQ ID NO: 1495 - RNA, 19 nt, synthetic construct
  source 1..19: mol_type = other RNA
acaattggagaaggacagc

SEQ ID NO: 1496 - RNA, 19 nt, synthetic construct
  source 1..19: mol_type = other RNA
caattggagaaggacagca

SEQ ID NO: 1497 - RNA, 19 nt, synthetic construct
  source 1..19: mol_type = other RNA
aattggagaaggacagcaa

SEQ ID NO: 1498 - RNA, 19 nt, synthetic construct
  source 1..19: mol_type = other RNA
attggagaaggacagcaac

SEQ ID NO: 1499 - RNA, 19 nt, synthetic construct
  source 1..19: mol_type = other RNA
ttggagaaggacagcaaca

SEQ ID NO: 1500 - RNA, 19 nt, synthetic construct
  source 1..19: mol_type = other RNA
tggagaaggacagcaacac

SEQ ID NO: 1501 - RNA, 19 nt, synthetic construct
  source 1..19: mol_type = other RNA
ggagaaggacagcaacacc

SEQ ID NO: 1502 - RNA, 19 nt, synthetic construct
  source 1..19: mol_type = other RNA
gagaaggacagcaacacca

SEQ ID NO: 1503 - RNA, 19 nt, synthetic construct
  source 1..19: mol_type = other RNA
agaaggacagcaacaccac

SEQ ID NO: 1504 - RNA, 19 nt, synthetic construct
  source 1..19: mol_type = other RNA
gaaggacagcaacaccacc

SEQ ID NO: 1505 - RNA, 19 nt, synthetic construct
  source 1..19: mol_type = other RNA
aaggacagcaacaccacct

SEQ ID NO: 1506 - RNA, 19 nt, synthetic construct
  source 1..19: mol_type = other RNA
aggacagcaacaccacctg

SEQ ID NO: 1507 - RNA, 19 nt, synthetic construct
  source 1..19: mol_type = other RNA
ggacagcaacaccacctgg

SEQ ID NO: 1508 - RNA, 19 nt, synthetic construct
  source 1..19: mol_type = other RNA
gacagcaacaccacctggg

SEQ ID NO: 1509 - RNA, 19 nt, synthetic construct
  source 1..19: mol_type = other RNA
acagcaacaccacctgggg

SEQ ID NO: 1510 - RNA, 19 nt, synthetic construct
  source 1..19: mol_type = other RNA
cagcaacaccacctggggg

SEQ ID NO: 1511 - RNA, 19 nt, synthetic construct
  source 1..19: mol_type = other RNA
agcaacaccacctgggggg

SEQ ID NO: 1512 - RNA, 19 nt, synthetic construct
  source 1..19: mol_type = other RNA
gcaacaccacctgggggga

SEQ ID NO: 1513 - RNA, 19 nt, synthetic construct
  source 1..19: mol_type = other RNA
caacaccacctggggggag

SEQ ID NO: 1514 - RNA, 19 nt, synthetic construct
  source 1..19: mol_type = other RNA
aacaccacctggggggagc

SEQ ID NO: 1515 - RNA, 19 nt, synthetic construct
  source 1..19: mol_type = other RNA
acaccacctggggggagcc

SEQ ID NO: 1516 - RNA, 19 nt, synthetic construct
  source 1..19: mol_type = other RNA
caccacctggggggagcca

SEQ ID NO: 1517 - RNA, 19 nt, synthetic construct
  source 1..19: mol_type = other RNA
accacctggggggagccaa

SEQ ID NO: 1518 - RNA, 19 nt, synthetic construct
  source 1..19: mol_type = other RNA
ccacctggggggagccaaa

SEQ ID NO: 1519 - RNA, 19 nt, synthetic construct
  source 1..19: mol_type = other RNA
cacctggggggagccaaac

SEQ ID NO: 1520 - RNA, 19 nt, synthetic construct
  source 1..19: mol_type = other RNA
acctggggggagccaaaca

SEQ ID NO: 1521 - RNA, 19 nt, synthetic construct
  source 1..19: mol_type = other RNA
cctggggggagccaaacag

SEQ ID NO: 1522 - RNA, 19 nt, synthetic construct
  source 1..19: mol_type = other RNA
ctggggggagccaaacagg

SEQ ID NO: 1523 - RNA, 19 nt, synthetic construct
  source 1..19: mol_type = other RNA
tggggggagccaaacaggc

SEQ ID NO: 1524 - RNA, 19 nt, synthetic construct
  source 1..19: mol_type = other RNA
ggggggagccaaacaggct

SEQ ID NO: 1525 - RNA, 19 nt, synthetic construct
  source 1..19: mol_type = other RNA
gggggagccaaacaggctg

SEQ ID NO: 1526 - RNA, 19 nt, synthetic construct
  source 1..19: mol_type = other RNA
ggggagccaaacaggctgg

SEQ ID NO: 1527 - RNA, 19 nt, synthetic construct
  source 1..19: mol_type = other RNA
gggagccaaacaggctgga

SEQ ID NO: 1528 - RNA, 19 nt, synthetic construct
  source 1..19: mol_type = other RNA
ggagccaaacaggctggag

SEQ ID NO: 1529 - RNA, 19 nt, synthetic construct
  source 1..19: mol_type = other RNA
gagccaaacaggctggaga

SEQ ID NO: 1530 - RNA, 19 nt, synthetic construct
  source 1..19: mol_type = other RNA
agccaaacaggctggagac

SEQ ID NO: 1531 - RNA, 19 nt, synthetic construct
  source 1..19: mol_type = other RNA
gccaaacaggctggagacg

SEQ ID NO: 1532 - RNA, 19 nt, synthetic construct
  source 1..19: mol_type = other RNA
ccaaacaggctggagacgt

SEQ ID NO: 1533 - RNA, 19 nt, synthetic construct
  source 1..19: mol_type = other RNA
caaacaggctggagacgtt

SEQ ID NO: 1534 - RNA, 19 nt, synthetic construct
  source 1..19: mol_type = other RNA
aaacaggctggagacgttt

SEQ ID NO: 1535 - RNA, 19 nt, synthetic construct
  source 1..19: mol_type = other RNA
aacaggctggagacgttta

SEQ ID NO: 1536 - RNA, 19 nt, synthetic construct
  source 1..19: mol_type = other RNA
acaggctggagacgtttaa

SEQ ID NO: 1537 - RNA, 19 nt, synthetic construct
  source 1..19: mol_type = other RNA
caggctggagacgtttaaa

SEQ ID NO: 1538 - RNA, 19 nt, synthetic construct
  source 1..19: mol_type = other RNA
aggctggagacgtttaaaa

SEQ ID NO: 1539 - RNA, 19 nt, synthetic construct
  source 1..19: mol_type = other RNA
ggctggagacgtttaaaag

SEQ ID NO: 1540 - RNA, 19 nt, synthetic construct
  source 1..19: mol_type = other RNA
gctggagacgtttaaaaga

SEQ ID NO: 1541 - RNA, 19 nt, synthetic construct
  source 1..19: mol_type = other RNA
ctggagacgtttaaaagac

SEQ ID NO: 1542 - RNA, 19 nt, synthetic construct
  source 1..19: mol_type = other RNA
tggagacgtttaaaagacc

SEQ ID NO: 1543 - RNA, 19 nt, synthetic construct
  source 1..19: mol_type = other RNA
ggagacgtttaaaagaccg

SEQ ID NO: 1544 - RNA, 19 nt, synthetic construct
  source 1..19: mol_type = other RNA
gagacgtttaaaagaccgt

SEQ ID NO: 1545 - RNA, 19 nt, synthetic construct
  source 1..19: mol_type = other RNA
agacgtttaaaagaccgtt

SEQ ID NO: 1546 - RNA, 19 nt, synthetic construct
  source 1..19: mol_type = other RNA
gacgtttaaaagaccgttt

SEQ ID NO: 1547 - RNA, 19 nt, synthetic construct
  source 1..19: mol_type = other RNA
acgtttaaaagaccgtttc

SEQ ID NO: 1548 - RNA, 19 nt, synthetic construct
  source 1..19: mol_type = other RNA
cgtttaaaagaccgtttca

SEQ ID NO: 1549 - RNA, 19 nt, synthetic construct
  source 1..19: mol_type = other RNA
gtttaaaagaccgtttcaa

SEQ ID NO: 1550 - RNA, 19 nt, synthetic construct
  source 1..19: mol_type = other RNA
tttaaaagaccgtttcaaa

SEQ ID NO: 1551 - RNA, 19 nt, synthetic construct
  source 1..19: mol_type = other RNA
ttaaaagaccgtttcaaaa

SEQ ID NO: 1552 - RNA, 19 nt, synthetic construct
  source 1..19: mol_type = other RNA
taaaagaccgtttcaaaag

SEQ ID NO: 1553 - RNA, 19 nt, synthetic construct
  source 1..19: mol_type = other RNA
aaaagaccgtttcaaaaga

SEQ ID NO: 1554 - RNA, 19 nt, synthetic construct
  source 1..19: mol_type = other RNA
aaagaccgtttcaaaagag

SEQ ID NO: 1555 - RNA, 19 nt, synthetic construct
  source 1..19: mol_type = other RNA
aagaccgtttcaaaagaga

SEQ ID NO: 1556 - RNA, 19 nt, synthetic construct
  source 1..19: mol_type = other RNA
agaccgtttcaaaagagat

SEQ ID NO: 1557 - RNA, 19 nt, synthetic construct
  source 1..19: mol_type = other RNA
gaccgtttcaaaagagatt

SEQ ID NO: 1558 - RNA, 19 nt, synthetic construct
  source 1..19: mol_type = other RNA
accgtttcaaaagagattt

SEQ ID NO: 1559 - RNA, 19 nt, synthetic construct
  source 1..19: mol_type = other RNA
ccgtttcaaaagagattta

SEQ ID NO: 1560 - RNA, 19 nt, synthetic construct
  source 1..19: mol_type = other RNA
cgtttcaaaagagatttac

SEQ ID NO: 1561 - RNA, 19 nt, synthetic construct
  source 1..19: mol_type = other RNA
gtttcaaaagagatttact

SEQ ID NO: 1562 - RNA, 19 nt, synthetic construct
  source 1..19: mol_type = other RNA
tttcaaaagagatttactt

SEQ ID NO: 1563 - RNA, 19 nt, synthetic construct
  source 1..19: mol_type = other RNA
ttcaaaagagatttacttt

SEQ ID NO: 1564 - RNA, 19 nt, synthetic construct
  source 1..19: mol_type = other RNA
tcaaaagagatttactttt

SEQ ID NO: 1565 - RNA, 19 nt, synthetic construct
  source 1..19: mol_type = other RNA
caaaagagatttacttttt

SEQ ID NO: 1566 - RNA, 19 nt, synthetic construct
  source 1..19: mol_type = other RNA
aaaagagatttactttttt

SEQ ID NO: 1567 - RNA, 19 nt, synthetic construct
  source 1..19: mol_type = other RNA
aaagagatttactttttta

SEQ ID NO: 1568 - RNA, 19 nt, synthetic construct
  source 1..19: mol_type = other RNA
aagagatttacttttttaa

SEQ ID NO: 1569 - RNA, 19 nt, synthetic construct
  source 1..19: mol_type = other RNA
agagatttacttttttaaa

SEQ ID NO: 1570 - RNA, 19 nt, synthetic construct
  source 1..19: mol_type = other RNA
gagatttacttttttaaag

SEQ ID NO: 1571 - RNA, 19 nt, synthetic construct
  source 1..19: mol_type = other RNA
agatttacttttttaaagg

SEQ ID NO: 1572 - RNA, 19 nt, synthetic construct
  source 1..19: mol_type = other RNA
gatttacttttttaaagga

SEQ ID NO: 1573 - RNA, 19 nt, synthetic construct
  source 1..19: mol_type = other RNA
atttacttttttaaaggac

SEQ ID NO: 1574 - RNA, 19 nt, synthetic construct
  source 1..19: mol_type = other RNA
tttacttttttaaaggact

SEQ ID NO: 1575 - RNA, 19 nt, synthetic construct
  source 1..19: mol_type = other RNA
ttacttttttaaaggactt

SEQ ID NO: 1576 - RNA, 19 nt, synthetic construct
  source 1..19: mol_type = other RNA
tacttttttaaaggacttt

SEQ ID NO: 1577 - RNA, 19 nt, synthetic construct
  source 1..19: mol_type = other RNA
acttttttaaaggacttta

SEQ ID NO: 1578 - RNA, 19 nt, synthetic construct
  source 1..19: mol_type = other RNA
cttttttaaaggactttat

SEQ ID NO: 1579 - RNA, 19 nt, synthetic construct
  source 1..19: mol_type = other RNA
ttttttaaaggactttatc

SEQ ID NO: 1580 - RNA, 19 nt, synthetic construct
  source 1..19: mol_type = other RNA
tttttaaaggactttatct

SEQ ID NO: 1581 - RNA, 19 nt, synthetic construct
  source 1..19: mol_type = other RNA
ttttaaaggactttatctg

SEQ ID NO: 1582 - RNA, 19 nt, synthetic construct
  source 1..19: mol_type = other RNA
tttaaaggactttatctga

SEQ ID NO: 1583 - RNA, 19 nt, synthetic construct
  source 1..19: mol_type = other RNA
ttaaaggactttatctgaa

SEQ ID NO: 1584 - RNA, 19 nt, synthetic construct
  source 1..19: mol_type = other RNA
taaaggactttatctgaac

SEQ ID NO: 1585 - RNA, 19 nt, synthetic construct
  source 1..19: mol_type = other RNA
aaaggactttatctgaaca

SEQ ID NO: 1586 - RNA, 19 nt, synthetic construct
  source 1..19: mol_type = other RNA
aaggactttatctgaacag

SEQ ID NO: 1587 - RNA, 19 nt, synthetic construct
  source 1..19: mol_type = other RNA
aggactttatctgaacaga

SEQ ID NO: 1588 - RNA, 19 nt, synthetic construct
  source 1..19: mol_type = other RNA
ggactttatctgaacagag

SEQ ID NO: 1589 - RNA, 19 nt, synthetic construct
  source 1..19: mol_type = other RNA
gactttatctgaacagaga

SEQ ID NO: 1590 - RNA, 19 nt, synthetic construct
  source 1..19: mol_type = other RNA
actttatctgaacagagag

SEQ ID NO: 1591 - RNA, 19 nt, synthetic construct
  source 1..19: mol_type = other RNA
ctttatctgaacagagaga

SEQ ID NO: 1592 - RNA, 19 nt, synthetic construct
  source 1..19: mol_type = other RNA
tttatctgaacagagagat

SEQ ID NO: 1593 - RNA, 19 nt, synthetic construct
  source 1..19: mol_type = other RNA
ttatctgaacagagagata

SEQ ID NO: 1594 - RNA, 19 nt, synthetic construct
  source 1..19: mol_type = other RNA
tatctgaacagagagatat

SEQ ID NO: 1595 - RNA, 19 nt, synthetic construct
  source 1..19: mol_type = other RNA
atctgaacagagagatata

SEQ ID NO: 1596 - RNA, 19 nt, synthetic construct
  source 1..19: mol_type = other RNA
tctgaacagagagatataa

SEQ ID NO: 1597 - RNA, 19 nt, synthetic construct
  source 1..19: mol_type = other RNA
ctgaacagagagatataat

SEQ ID NO: 1598 - RNA, 19 nt, synthetic construct
  source 1..19: mol_type = other RNA
tgaacagagagatataata

SEQ ID NO: 1599 - RNA, 19 nt, synthetic construct
  source 1..19: mol_type = other RNA
gaacagagagatataatat

SEQ ID NO: 1600 - RNA, 19 nt, synthetic construct
  source 1..19: mol_type = other RNA
aacagagagatataatatt

SEQ ID NO: 1601 - RNA, 19 nt, synthetic construct
  source 1..19: mol_type = other RNA
acagagagatataatattt

SEQ ID NO: 1602 - RNA, 19 nt, synthetic construct
  source 1..19: mol_type = other RNA
cagagagatataatatttt

SEQ ID NO: 1603 - RNA, 19 nt, synthetic construct
  source 1..19: mol_type = other RNA
agagagatataatattttt

SEQ ID NO: 1604 - RNA, 19 nt, synthetic construct
  source 1..19: mol_type = other RNA
gagagatataatatttttc

SEQ ID NO: 1605 - RNA, 19 nt, synthetic construct
  source 1..19: mol_type = other RNA
agagatataatatttttcc

SEQ ID NO: 1606 - RNA, 19 nt, synthetic construct
  source 1..19: mol_type = other RNA
gagatataatatttttcct

SEQ ID NO: 1607 - RNA, 19 nt, synthetic construct
  source 1..19: mol_type = other RNA
agatataatatttttccta

SEQ ID NO: 1608 - RNA, 19 nt, synthetic construct
  source 1..19: mol_type = other RNA
gatataatatttttcctat

SEQ ID NO: 1609 - RNA, 19 nt, synthetic construct
  source 1..19: mol_type = other RNA
atataatatttttcctatt

SEQ ID NO: 1610 - RNA, 19 nt, synthetic construct
  source 1..19: mol_type = other RNA
tataatatttttcctattg

SEQ ID NO: 1611 - RNA, 19 nt, synthetic construct
  source 1..19: mol_type = other RNA
ataatatttttcctattgg

SEQ ID NO: 1612 - RNA, 19 nt, synthetic construct
  source 1..19: mol_type = other RNA
taatatttttcctattgga

SEQ ID NO: 1613 - RNA, 19 nt, synthetic construct
  source 1..19: mol_type = other RNA
aatatttttcctattggac

SEQ ID NO: 1614 - RNA, 19 nt, synthetic construct
  source 1..19: mol_type = other RNA
atatttttcctattggaca

SEQ ID NO: 1615 - RNA, 19 nt, synthetic construct
  source 1..19: mol_type = other RNA
tatttttcctattggacaa

SEQ ID NO: 1616 - RNA, 19 nt, synthetic construct
  source 1..19: mol_type = other RNA
atttttcctattggacaat

SEQ ID NO: 1617 - RNA, 19 nt, synthetic construct
  source 1..19: mol_type = other RNA
tttttcctattggacaatg

SEQ ID NO: 1618 - RNA, 19 nt, synthetic construct
  source 1..19: mol_type = other RNA
ttttcctattggacaatgg

SEQ ID NO: 1619 - RNA, 19 nt, synthetic construct
  source 1..19: mol_type = other RNA
tttcctattggacaatgga

SEQ ID NO: 1620 - RNA, 19 nt, synthetic construct
  source 1..19: mol_type = other RNA
ttcctattggacaatggac

SEQ ID NO: 1621 - RNA, 19 nt, synthetic construct
  source 1..19: mol_type = other RNA
tcctattggacaatggact

SEQ ID NO: 1622 - RNA, 19 nt, synthetic construct
  source 1..19: mol_type = other RNA
cctattggacaatggactt

SEQ ID NO: 1623 - RNA, 19 nt, synthetic construct
  source 1..19: mol_type = other RNA
ctattggacaatggacttg

SEQ ID NO: 1624 - RNA, 19 nt, synthetic construct
  source 1..19: mol_type = other RNA
tattggacaatggacttgc

SEQ ID NO: 1625 - RNA, 19 nt, synthetic construct
  source 1..19: mol_type = other RNA
attggacaatggacttgca

SEQ ID NO: 1626 - RNA, 19 nt, synthetic construct
  source 1..19: mol_type = other RNA
ttggacaatggacttgcaa

SEQ ID NO: 1627 - RNA, 19 nt, synthetic construct
  source 1..19: mol_type = other RNA
tggacaatggacttgcaaa

SEQ ID NO: 1628 - RNA, 19 nt, synthetic construct
  source 1..19: mol_type = other RNA
ggacaatggacttgcaaag

SEQ ID NO: 1629 - RNA, 19 nt, synthetic construct
  source 1..19: mol_type = other RNA
gacaatggacttgcaaagc

SEQ ID NO: 1630 - RNA, 19 nt, synthetic construct
  source 1..19: mol_type = other RNA
acaatggacttgcaaagct

SEQ ID NO: 1631 - RNA, 19 nt, synthetic construct
  source 1..19: mol_type = other RNA
caatggacttgcaaagctt

SEQ ID NO: 1632 - RNA, 19 nt, synthetic construct
  source 1..19: mol_type = other RNA
aatggacttgcaaagcttc

SEQ ID NO: 1633 - RNA, 19 nt, synthetic construct
  source 1..19: mol_type = other RNA
atggacttgcaaagcttca

SEQ ID NO: 1634 - RNA, 19 nt, synthetic construct
  source 1..19: mol_type = other RNA
tggacttgcaaagcttcac

SEQ ID NO: 1635 - RNA, 19 nt, synthetic construct
  source 1..19: mol_type = other RNA
ggacttgcaaagcttcact

SEQ ID NO: 1636 - RNA, 19 nt, synthetic construct
  source 1..19: mol_type = other RNA
gacttgcaaagcttcactt

SEQ ID NO: 1637 - RNA, 19 nt, synthetic construct
  source 1..19: mol_type = other RNA
acttgcaaagcttcacttc

SEQ ID NO: 1638 - RNA, 19 nt, synthetic construct
  source 1..19: mol_type = other RNA
cttgcaaagcttcacttca

SEQ ID NO: 1639 - RNA, 19 nt, synthetic construct
  source 1..19: mol_type = other RNA
ttgcaaagcttcacttcat

SEQ ID NO: 1640 - RNA, 19 nt, synthetic construct
  source 1..19: mol_type = other RNA
tgcaaagcttcacttcatt

SEQ ID NO: 1641 - RNA, 19 nt, synthetic construct
  source 1..19: mol_type = other RNA
gcaaagcttcacttcattt

SEQ ID NO: 1642 - RNA, 19 nt, synthetic construct
  source 1..19: mol_type = other RNA
caaagcttcacttcatttt

SEQ ID NO: 1643 - RNA, 19 nt, synthetic construct
  source 1..19: mol_type = other RNA
aaagcttcacttcatttta

SEQ ID NO: 1644 - RNA, 19 nt, synthetic construct
  source 1..19: mol_type = other RNA
aagcttcacttcattttaa

SEQ ID NO: 1645 - RNA, 19 nt, synthetic construct
  source 1..19: mol_type = other RNA
agcttcacttcattttaag

SEQ ID NO: 1646 - RNA, 19 nt, synthetic construct
  source 1..19: mol_type = other RNA
gcttcacttcattttaaga

SEQ ID NO: 1647 - RNA, 19 nt, synthetic construct
  source 1..19: mol_type = other RNA
cttcacttcattttaagag

SEQ ID NO: 1648 - RNA, 19 nt, synthetic construct
  source 1..19: mol_type = other RNA
ttcacttcattttaagagc

SEQ ID NO: 1649 - RNA, 19 nt, synthetic construct
  source 1..19: mol_type = other RNA
tcacttcattttaagagca

SEQ ID NO: 1650 - RNA, 19 nt, synthetic construct
  source 1..19: mol_type = other RNA
cacttcattttaagagcaa

SEQ ID NO: 1651 - RNA, 19 nt, synthetic construct
  source 1..19: mol_type = other RNA
acttcattttaagagcaaa

SEQ ID NO: 1652 - RNA, 19 nt, synthetic construct
  source 1..19: mol_type = other RNA
cttcattttaagagcaaaa

SEQ ID NO: 1653 - RNA, 19 nt, synthetic construct
  source 1..19: mol_type = other RNA
ttcattttaagagcaaaag

SEQ ID NO: 1654 - RNA, 19 nt, synthetic construct
  source 1..19: mol_type = other RNA
tcattttaagagcaaaaga

SEQ ID NO: 1655 - RNA, 19 nt, synthetic construct
  source 1..19: mol_type = other RNA
cattttaagagcaaaagac

SEQ ID NO: 1656 - RNA, 19 nt, synthetic construct
  source 1..19: mol_type = other RNA
attttaagagcaaaagacc

SEQ ID NO: 1657 - RNA, 19 nt, synthetic construct
  source 1..19: mol_type = other RNA
ttttaagagcaaaagaccc

SEQ ID NO: 1658 - RNA, 19 nt, synthetic construct
  source 1..19: mol_type = other RNA
tttaagagcaaaagacccc

SEQ ID NO: 1659 - RNA, 19 nt, synthetic construct
  source 1..19: mol_type = other RNA
ttaagagcaaaagacccca

SEQ ID NO: 1660 - RNA, 19 nt, synthetic construct
  source 1..19: mol_type = other RNA
taagagcaaaagaccccat

SEQ ID NO: 1661 - RNA, 19 nt, synthetic construct
  source 1..19: mol_type = other RNA
aagagcaaaagaccccatg

SEQ ID NO: 1662 - RNA, 19 nt, synthetic construct
  source 1..19: mol_type = other RNA
agagcaaaagaccccatgt

SEQ ID NO: 1663 - RNA, 19 nt, synthetic construct
  source 1..19: mol_type = other RNA
gagcaaaagaccccatgtt

SEQ ID NO: 1664 - RNA, 19 nt, synthetic construct
  source 1..19: mol_type = other RNA
agcaaaagaccccatgttg

SEQ ID NO: 1665 - RNA, 19 nt, synthetic construct
  source 1..19: mol_type = other RNA
gcaaaagaccccatgttga

SEQ ID NO: 1666 - RNA, 19 nt, synthetic construct
  source 1..19: mol_type = other RNA
caaaagaccccatgttgaa

SEQ ID NO: 1667 - RNA, 19 nt, synthetic construct
  source 1..19: mol_type = other RNA
aaaagaccccatgttgaaa

SEQ ID NO: 1668 - RNA, 19 nt, synthetic construct
  source 1..19: mol_type = other RNA
aaagaccccatgttgaaaa

SEQ ID NO: 1669 - RNA, 19 nt, synthetic construct
  source 1..19: mol_type = other RNA
aagaccccatgttgaaaac

SEQ ID NO: 1670 - RNA, 19 nt, synthetic construct
  source 1..19: mol_type = other RNA
agaccccatgttgaaaact

SEQ ID NO: 1671 - RNA, 19 nt, synthetic construct
  source 1..19: mol_type = other RNA
gaccccatgttgaaaactc

SEQ ID NO: 1672 - RNA, 19 nt, synthetic construct
  source 1..19: mol_type = other RNA
accccatgttgaaaactcc

SEQ ID NO: 1673 - RNA, 19 nt, synthetic construct
  source 1..19: mol_type = other RNA
ccccatgttgaaaactcca

SEQ ID NO: 1674 - RNA, 19 nt, synthetic construct
  source 1..19: mol_type = other RNA
cccatgttgaaaactccat

SEQ ID NO: 1675 - RNA, 19 nt, synthetic construct
  source 1..19: mol_type = other RNA
ccatgttgaaaactccata

SEQ ID NO: 1676 - RNA, 19 nt, synthetic construct
  source 1..19: mol_type = other RNA
catgttgaaaactccataa

SEQ ID NO: 1677 - RNA, 19 nt, synthetic construct
  source 1..19: mol_type = other RNA
atgttgaaaactccataac

SEQ ID NO: 1678 - RNA, 19 nt, synthetic construct
  source 1..19: mol_type = other RNA
tgttgaaaactccataaca

SEQ ID NO: 1679 - RNA, 19 nt, synthetic construct
  source 1..19: mol_type = other RNA
gttgaaaactccataacag

SEQ ID NO: 1680 - RNA, 19 nt, synthetic construct
  source 1..19: mol_type = other RNA
ttgaaaactccataacagt

SEQ ID NO: 1681 - RNA, 19 nt, synthetic construct
  source 1..19: mol_type = other RNA
tgaaaactccataacagtt

SEQ ID NO: 1682 - RNA, 19 nt, synthetic construct
  source 1..19: mol_type = other RNA
gaaaactccataacagttt

SEQ ID NO: 1683 - RNA, 19 nt, synthetic construct
  source 1..19: mol_type = other RNA
aaaactccataacagtttt

SEQ ID NO: 1684 - RNA, 19 nt, synthetic construct
  source 1..19: mol_type = other RNA
aaactccataacagtttta

SEQ ID NO: 1685 - RNA, 19 nt, synthetic construct
  source 1..19: mol_type = other RNA
aactccataacagttttat

SEQ ID NO: 1686 - RNA, 19 nt, synthetic construct
  source 1..19: mol_type = other RNA
actccataacagttttatg

SEQ ID NO: 1687 - RNA, 19 nt, synthetic construct
  source 1..19: mol_type = other RNA
ctccataacagttttatgc

SEQ ID NO: 1688 - RNA, 19 nt, synthetic construct
  source 1..19: mol_type = other RNA
tccataacagttttatgct

SEQ ID NO: 1689 - RNA, 19 nt, synthetic construct
  source 1..19: mol_type = other RNA
ccataacagttttatgctg

SEQ ID NO: 1690 - RNA, 19 nt, synthetic construct
  source 1..19: mol_type = other RNA
cataacagttttatgctga

SEQ ID NO: 1691 - RNA, 19 nt, synthetic construct
  source 1..19: mol_type = other RNA
ataacagttttatgctgat

SEQ ID NO: 1692 - RNA, 19 nt, synthetic construct
  source 1..19: mol_type = other RNA
taacagttttatgctgatg

SEQ ID NO: 1693 - RNA, 19 nt, synthetic construct
  source 1..19: mol_type = other RNA
aacagttttatgctgatga

SEQ ID NO: 1694 - RNA, 19 nt, synthetic construct
  source 1..19: mol_type = other RNA
acagttttatgctgatgat

SEQ ID NO: 1695 - RNA, 19 nt, synthetic construct
  source 1..19: mol_type = other RNA
cagttttatgctgatgata

SEQ ID NO: 1696 - RNA, 19 nt, synthetic construct
  source 1..19: mol_type = other RNA
agttttatgctgatgataa

SEQ ID NO: 1697 - RNA, 19 nt, synthetic construct
  source 1..19: mol_type = other RNA
gttttatgctgatgataat

SEQ ID NO: 1698 - RNA, 19 nt, synthetic construct
  source 1..19: mol_type = other RNA
ttttatgctgatgataatt

SEQ ID NO: 1699 - RNA, 19 nt, synthetic construct
  source 1..19: mol_type = other RNA
tttatgctgatgataattt

SEQ ID NO: 1700 - RNA, 19 nt, synthetic construct
  source 1..19: mol_type = other RNA
ttatgctgatgataattta

SEQ ID NO: 1701 - RNA, 19 nt, synthetic construct
  source 1..19: mol_type = other RNA
tatgctgatgataatttat

SEQ ID NO: 1702 - RNA, 19 nt, synthetic construct
  source 1..19: mol_type = other RNA
atgctgatgataatttatc

SEQ ID NO: 1703 - RNA, 19 nt, synthetic construct
  source 1..19: mol_type = other RNA
tgctgatgataatttatct

SEQ ID NO: 1704 - RNA, 19 nt, synthetic construct
  source 1..19: mol_type = other RNA
gctgatgataatttatcta

SEQ ID NO: 1705 - RNA, 19 nt, synthetic construct
  source 1..19: mol_type = other RNA
ctgatgataatttatctac

SEQ ID NO: 1706 - RNA, 19 nt, synthetic construct
  source 1..19: mol_type = other RNA
tgatgataatttatctaca

SEQ ID NO: 1707 - RNA, 19 nt, synthetic construct
  source 1..19: mol_type = other RNA
gatgataatttatctacat

SEQ ID NO: 1708 - RNA, 19 nt, synthetic construct
  source 1..19: mol_type = other RNA
atgataatttatctacatg

SEQ ID NO: 1709 - RNA, 19 nt, synthetic construct
  source 1..19: mol_type = other RNA
tgataatttatctacatgc

SEQ ID NO: 1710 - RNA, 19 nt, synthetic construct
  source 1..19: mol_type = other RNA
gataatttatctacatgca

SEQ ID NO: 1711 - RNA, 19 nt, synthetic construct
  source 1..19: mol_type = other RNA
ataatttatctacatgcat

SEQ ID NO: 1712 - RNA, 19 nt, synthetic construct
  source 1..19: mol_type = other RNA
taatttatctacatgcatt

SEQ ID NO: 1713 - RNA, 19 nt, synthetic construct
  source 1..19: mol_type = other RNA
aatttatctacatgcattt

SEQ ID NO: 1714 - RNA, 19 nt, synthetic construct
  source 1..19: mol_type = other RNA
atttatctacatgcatttc

SEQ ID NO: 1715 - RNA, 19 nt, synthetic construct
  source 1..19: mol_type = other RNA
tttatctacatgcatttca

SEQ ID NO: 1716 - RNA, 19 nt, synthetic construct
  source 1..19: mol_type = other RNA
ttatctacatgcatttcaa

SEQ ID NO: 1717 - RNA, 19 nt, synthetic construct
  source 1..19: mol_type = other RNA
tatctacatgcatttcaat

SEQ ID NO: 1718 - RNA, 19 nt, synthetic construct
  source 1..19: mol_type = other RNA
atctacatgcatttcaata

SEQ ID NO: 1719 - RNA, 19 nt, synthetic construct
  source 1..19: mol_type = other RNA
tctacatgcatttcaataa

SEQ ID NO: 1720 - RNA, 19 nt, synthetic construct
  source 1..19: mol_type = other RNA
ctacatgcatttcaataaa

SEQ ID NO: 1721 - RNA, 19 nt, synthetic construct
  source 1..19: mol_type = other RNA
tacatgcatttcaataaac

SEQ ID NO: 1722 - RNA, 19 nt, synthetic construct
  source 1..19: mol_type = other RNA
acatgcatttcaataaacc

SEQ ID NO: 1723 - RNA, 19 nt, synthetic construct
  source 1..19: mol_type = other RNA
catgcatttcaataaacct

SEQ ID NO: 1724 - RNA, 19 nt, synthetic construct
  source 1..19: mol_type = other RNA
atgcatttcaataaacctt

SEQ ID NO: 1725 - RNA, 19 nt, synthetic construct
  source 1..19: mol_type = other RNA
tgcatttcaataaaccttt

SEQ ID NO: 1726 - RNA, 19 nt, synthetic construct
  source 1..19: mol_type = other RNA
gcatttcaataaacctttt

SEQ ID NO: 1727 - RNA, 19 nt, synthetic construct
  source 1..19: mol_type = other RNA
catttcaataaaccttttg

SEQ ID NO: 1728 - RNA, 19 nt, synthetic construct
  source 1..19: mol_type = other RNA
atttcaataaaccttttgt

SEQ ID NO: 1729 - RNA, 19 nt, synthetic construct
  source 1..19: mol_type = other RNA
tttcaataaaccttttgtt

SEQ ID NO: 1730 - RNA, 19 nt, synthetic construct
  source 1..19: mol_type = other RNA
ttcaataaaccttttgttt

SEQ ID NO: 1731 - RNA, 19 nt, synthetic construct
  source 1..19: mol_type = other RNA
tcaataaaccttttgtttc

SEQ ID NO: 1732 - RNA, 19 nt, synthetic construct
  source 1..19: mol_type = other RNA
caataaaccttttgtttcc

SEQ ID NO: 1733 - RNA, 19 nt, synthetic construct
  source 1..19: mol_type = other RNA
aataaaccttttgtttcct

SEQ ID NO: 1734 - RNA, 19 nt, synthetic construct
  source 1..19: mol_type = other RNA
ataaaccttttgtttccta

SEQ ID NO: 1735 - RNA, 19 nt, synthetic construct
  source 1..19: mol_type = other RNA
taaaccttttgtttcctaa

SEQ ID NO: 1736 - RNA, 19 nt, synthetic construct
  source 1..19: mol_type = other RNA
aaaccttttgtttcctaag

SEQ ID NO: 1737 - RNA, 19 nt, synthetic construct
  source 1..19: mol_type = other RNA
aaccttttgtttcctaaga

SEQ ID NO: 1738 - RNA, 19 nt, synthetic construct
  source 1..19: mol_type = other RNA
accttttgtttcctaagac

SEQ ID NO: 1739 - RNA, 19 nt, synthetic construct
  source 1..19: mol_type = other RNA
ccttttgtttcctaagact

SEQ ID NO: 1740 - RNA, 19 nt, synthetic construct
  source 1..19: mol_type = other RNA
cttttgtttcctaagacta

SEQ ID NO: 1741 - RNA, 19 nt, synthetic construct
  source 1..19: mol_type = other RNA
ttttgtttcctaagactag

SEQ ID NO: 1742 - RNA, 19 nt, synthetic construct
  source 1..19: mol_type = other RNA
tttgtttcctaagactaga

SEQ ID NO: 1743 - RNA, 19 nt, synthetic construct
  source 1..19: mol_type = other RNA
gttgaagctcctccttttt

SEQ ID NO: 1744 - RNA, 19 nt, synthetic construct
  source 1..19: mol_type = other RNA
ggttgaagctcctcctttt

SEQ ID NO: 1745 - RNA, 19 nt, synthetic construct
  source 1..19: mol_type = other RNA
aggttgaagctcctccttt

SEQ ID NO: 1746 - RNA, 19 nt, synthetic construct
  source 1..19: mol_type = other RNA
caggttgaagctcctcctt

SEQ ID NO: 1747 - RNA, 19 nt, synthetic construct
  source 1..19: mol_type = other RNA
acaggttgaagctcctcct

SEQ ID NO: 1748 - RNA, 19 nt, synthetic construct
  source 1..19: mol_type = other RNA
cacaggttgaagctcctcc

SEQ ID NO: 1749 - RNA, 19 nt, synthetic construct
  source 1..19: mol_type = other RNA
acacaggttgaagctcctc

SEQ ID NO: 1750 - RNA, 19 nt, synthetic construct
  source 1..19: mol_type = other RNA
cacacaggttgaagctcct

SEQ ID NO: 1751 - RNA, 19 nt, synthetic construct
  source 1..19: mol_type = other RNA
gcacacaggttgaagctcc

SEQ ID NO: 1752 - RNA, 19 nt, synthetic construct
  source 1..19: mol_type = other RNA
tgcacacaggttgaagctc

SEQ ID NO: 1753 - RNA, 19 nt, synthetic construct
  source 1..19: mol_type = other RNA
ttgcacacaggttgaagct

SEQ ID NO: 1754 - RNA, 19 nt, synthetic construct
  source 1..19: mol_type = other RNA
tttgcacacaggttgaagc

SEQ ID NO: 1755 - RNA, 19 nt, synthetic construct
  source 1..19: mol_type = other RNA
ttttgcacacaggttgaag

SEQ ID NO: 1756 - RNA, 19 nt, synthetic construct
  source 1..19: mol_type = other RNA
attttgcacacaggttgaa

SEQ ID NO: 1757 - RNA, 19 nt, synthetic construct
  source 1..19: mol_type = other RNA
gattttgcacacaggttga

SEQ ID NO: 1758 - RNA, 19 nt, synthetic construct
  source 1..19: mol_type = other RNA
agattttgcacacaggttg

SEQ ID NO: 1759 - RNA, 19 nt, synthetic construct
  source 1..19: mol_type = other RNA
cagattttgcacacaggtt

SEQ ID NO: 1760 - RNA, 19 nt, synthetic construct
  source 1..19: mol_type = other RNA
ccagattttgcacacaggt

SEQ ID NO: 1761 - RNA, 19 nt, synthetic construct
  source 1..19: mol_type = other RNA
cccagattttgcacacagg

SEQ ID NO: 1762 - RNA, 19 nt, synthetic construct
  source 1..19: mol_type = other RNA
tcccagattttgcacacag

SEQ ID NO: 1763 - RNA, 19 nt, synthetic construct
  source 1..19: mol_type = other RNA
ttcccagattttgcacaca

SEQ ID NO: 1764 - RNA, 19 nt, synthetic construct
  source 1..19: mol_type = other RNA
gttcccagattttgcacac

SEQ ID NO: 1765 - RNA, 19 nt, synthetic construct
  source 1..19: mol_type = other RNA
ggttcccagattttgcaca

SEQ ID NO: 1766 - RNA, 19 nt, synthetic construct
  source 1..19: mol_type = other RNA
aggttcccagattttgcac

SEQ ID NO: 1767 - RNA, 19 nt, synthetic construct
  source 1..19: mol_type = other RNA
caggttcccagattttgca

SEQ ID NO: 1768 - RNA, 19 nt, synthetic construct
  source 1..19: mol_type = other RNA
tcaggttcccagattttgc

SEQ ID NO: 1769 - RNA, 19 nt, synthetic construct
  source 1..19: mol_type = other RNA
gtcaggttcccagattttg

SEQ ID NO: 1770 - RNA, 19 nt, synthetic construct
  source 1..19: mol_type = other RNA
tgtcaggttcccagatttt

SEQ ID NO: 1771 - RNA, 19 nt, synthetic construct
  source 1..19: mol_type = other RNA
ctgtcaggttcccagattt

SEQ ID NO: 1772 - RNA, 19 nt, synthetic construct
  source 1..19: mol_type = other RNA
actgtcaggttcccagatt

SEQ ID NO: 1773 - RNA, 19 nt, synthetic construct
  source 1..19: mol_type = other RNA
tactgtcaggttcccagat

SEQ ID NO: 1774 - RNA, 19 nt, synthetic construct
  source 1..19: mol_type = other RNA
atactgtcaggttcccaga

SEQ ID NO: 1775 - RNA, 19 nt, synthetic construct
  source 1..19: mol_type = other RNA
tatactgtcaggttcccag

SEQ ID NO: 1776 - RNA, 19 nt, synthetic construct
  source 1..19: mol_type = other RNA
ctatactgtcaggttccca

SEQ ID NO: 1777 - RNA, 19 nt, synthetic construct
  source 1..19: mol_type = other RNA
cctatactgtcaggttccc

SEQ ID NO: 1778 - RNA, 19 nt, synthetic construct
  source 1..19: mol_type = other RNA
acctatactgtcaggttcc

SEQ ID NO: 1779 - RNA, 19 nt, synthetic construct
  source 1..19: mol_type = other RNA
aacctatactgtcaggttc

SEQ ID NO: 1780 - RNA, 19 nt, synthetic construct
  source 1..19: mol_type = other RNA
caacctatactgtcaggtt

SEQ ID NO: 1781 - RNA, 19 nt, synthetic construct
  source 1..19: mol_type = other RNA
ccaacctatactgtcaggt

SEQ ID NO: 1782 - RNA, 19 nt, synthetic construct
  source 1..19: mol_type = other RNA
cccaacctatactgtcagg

SEQ ID NO: 1783 - RNA, 19 nt, synthetic construct
  source 1..19: mol_type = other RNA
ccccaacctatactgtcag

SEQ ID NO: 1784 - RNA, 19 nt, synthetic construct
  source 1..19: mol_type = other RNA
cccccaacctatactgtca

SEQ ID NO: 1785 - RNA, 19 nt, synthetic construct
  source 1..19: mol_type = other RNA
gcccccaacctatactgtc

SEQ ID NO: 1786 - RNA, 19 nt, synthetic construct
  source 1..19: mol_type = other RNA
ggcccccaacctatactgt

SEQ ID NO: 1787 - RNA, 19 nt, synthetic construct
  source 1..19: mol_type = other RNA
tggcccccaacctatactg

SEQ ID NO: 1788 - RNA, 19 nt, synthetic construct
  source 1..19: mol_type = other RNA
ctggcccccaacctatact

SEQ ID NO: 1789 - RNA, 19 nt, synthetic construct
  source 1..19: mol_type = other RNA
cctggcccccaacctatac

SEQ ID NO: 1790 - RNA, 19 nt, synthetic construct
  source 1..19: mol_type = other RNA
tcctggcccccaacctata

SEQ ID NO: 1791 - RNA, 19 nt, synthetic construct
  source 1..19: mol_type = other RNA
atcctggcccccaacctat

SEQ ID NO: 1792 - RNA, 19 nt, synthetic construct
  source 1..19: mol_type = other RNA
catcctggcccccaaccta

SEQ ID NO: 1793 - RNA, 19 nt, synthetic construct
  source 1..19: mol_type = other RNA
tcatcctggcccccaacct

SEQ ID NO: 1794 - RNA, 19 nt, synthetic construct
  source 1..19: mol_type = other RNA
ctcatcctggcccccaacc

SEQ ID NO: 1795 - RNA, 19 nt, synthetic construct
  source 1..19: mol_type = other RNA
cctcatcctggcccccaac

SEQ ID NO: 1796 - RNA, 19 nt, synthetic construct
  source 1..19: mol_type = other RNA
tcctcatcctggcccccaa

SEQ ID NO: 1797 - RNA, 19 nt, synthetic construct
  source 1..19: mol_type = other RNA
ttcctcatcctggccccca

SEQ ID NO: 1798 - RNA, 19 nt, synthetic construct
  source 1..19: mol_type = other RNA
tttcctcatcctggccccc

SEQ ID NO: 1799 - RNA, 19 nt, synthetic construct
  source 1..19: mol_type = other RNA
ttttcctcatcctggcccc

SEQ ID NO: 1800 - RNA, 19 nt, synthetic construct
  source 1..19: mol_type = other RNA
tttttcctcatcctggccc

SEQ ID NO: 1801 - RNA, 19 nt, synthetic construct
  source 1..19: mol_type = other RNA
ctttttcctcatcctggcc

SEQ ID NO: 1802 - RNA, 19 nt, synthetic construct
  source 1..19: mol_type = other RNA
cctttttcctcatcctggc

SEQ ID NO: 1803 - RNA, 19 nt, synthetic construct
  source 1..19: mol_type = other RNA
tcctttttcctcatcctgg

SEQ ID NO: 1804 - RNA, 19 nt, synthetic construct
  source 1..19: mol_type = other RNA
ttcctttttcctcatcctg

SEQ ID NO: 1805 - RNA, 19 nt, synthetic construct
  source 1..19: mol_type = other RNA
gttcctttttcctcatcct

SEQ ID NO: 1806 - RNA, 19 nt, synthetic construct
  source 1..19: mol_type = other RNA
cgttcctttttcctcatcc

SEQ ID NO: 1807 - RNA, 19 nt, synthetic construct
  source 1..19: mol_type = other RNA
ccgttcctttttcctcatc

SEQ ID NO: 1808 - RNA, 19 nt, synthetic construct
  source 1..19: mol_type = other RNA
cccgttcctttttcctcat

SEQ ID NO: 1809 - RNA, 19 nt, synthetic construct
  source 1..19: mol_type = other RNA
tcccgttcctttttcctca

SEQ ID NO: 1810 - RNA, 19 nt, synthetic construct
  source 1..19: mol_type = other RNA
ttcccgttcctttttcctc

SEQ ID NO: 1811 - RNA, 19 nt, synthetic construct
  source 1..19: mol_type = other RNA
tttcccgttcctttttcct

SEQ ID NO: 1812 - RNA, 19 nt, synthetic construct
  source 1..19: mol_type = other RNA
ctttcccgttcctttttcc

SEQ ID NO: 1813 - RNA, 19 nt, synthetic construct
  source 1..19: mol_type = other RNA
tctttcccgttcctttttc

SEQ ID NO: 1814 - RNA, 19 nt, synthetic construct
  source 1..19: mol_type = other RNA
gtctttcccgttccttttt

SEQ ID NO: 1815 - RNA, 19 nt, synthetic construct
  source 1..19: mol_type = other RNA
ggtctttcccgttcctttt

SEQ ID NO: 1816 - RNA, 19 nt, synthetic construct
  source 1..19: mol_type = other RNA
aggtctttcccgttccttt

SEQ ID NO: 1817 - RNA, 19 nt, synthetic construct
  source 1..19: mol_type = other RNA
caggtctttcccgttcctt

SEQ ID NO: 1818 - RNA, 19 nt, synthetic construct
  source 1..19: mol_type = other RNA
gcaggtctttcccgttcct

SEQ ID NO: 1819 - RNA, 19 nt, synthetic construct
  source 1..19: mol_type = other RNA
ggcaggtctttcccgttcc

SEQ ID NO: 1820 - RNA, 19 nt, synthetic construct
  source 1..19: mol_type = other RNA
gggcaggtctttcccgttc

SEQ ID NO: 1821 - RNA, 19 nt, synthetic construct
  source 1..19: mol_type = other RNA
tgggcaggtctttcccgtt

SEQ ID NO: 1822 - RNA, 19 nt, synthetic construct
  source 1..19: mol_type = other RNA
gtgggcaggtctttcccgt

SEQ ID NO: 1823 - RNA, 19 nt, synthetic construct
  source 1..19: mol_type = other RNA
ggtgggcaggtctttcccg

SEQ ID NO: 1824 - RNA, 19 nt, synthetic construct
  source 1..19: mol_type = other RNA
gggtgggcaggtctttccc

SEQ ID NO: 1825 - RNA, 19 nt, synthetic construct
  source 1..19: mol_type = other RNA
agggtgggcaggtctttcc

SEQ ID NO: 1826 - RNA, 19 nt, synthetic construct
  source 1..19: mol_type = other RNA
aagggtgggcaggtctttc

SEQ ID NO: 1827 - RNA, 19 nt, synthetic construct
  source 1..19: mol_type = other RNA
gaagggtgggcaggtcttt

SEQ ID NO: 1828 - RNA, 19 nt, synthetic construct
  source 1..19: mol_type = other RNA
agaagggtgggcaggtctt

SEQ ID NO: 1829 - RNA, 19 nt, synthetic construct
  source 1..19: mol_type = other RNA
cagaagggtgggcaggtct

SEQ ID NO: 1830 - RNA, 19 nt, synthetic construct
  source 1..19: mol_type = other RNA
ccagaagggtgggcaggtc

SEQ ID NO: 1831 - RNA, 19 nt, synthetic construct
  source 1..19: mol_type = other RNA
accagaagggtgggcaggt

SEQ ID NO: 1832 - RNA, 19 nt, synthetic construct
  source 1..19: mol_type = other RNA
taccagaagggtgggcagg

SEQ ID NO: 1833 - RNA, 19 nt, synthetic construct
  source 1..19: mol_type = other RNA
ttaccagaagggtgggcag

SEQ ID NO: 1834 - RNA, 19 nt, synthetic construct
  source 1..19: mol_type = other RNA
cttaccagaagggtgggca

SEQ ID NO: 1835 - RNA, 19 nt, synthetic construct
  source 1..19: mol_type = other RNA
ccttaccagaagggtgggc

SEQ ID NO: 1836 - RNA, 19 nt, synthetic construct
  source 1..19: mol_type = other RNA
tccttaccagaagggtggg

SEQ ID NO: 1837 - RNA, 19 nt, synthetic construct
  source 1..19: mol_type = other RNA
ctccttaccagaagggtgg

SEQ ID NO: 1838 - RNA, 19 nt, synthetic construct
  source 1..19: mol_type = other RNA
cctccttaccagaagggtg

SEQ ID NO: 1839 - RNA, 19 nt, synthetic construct
  source 1..19: mol_type = other RNA
gcctccttaccagaagggt

SEQ ID NO: 1840 - DNA, 19 bp, synthetic construct
  source 1..19: mol_type = other DNA
ggcctccttaccagaaggg

SEQ ID NO: 1841 - RNA, 19 nt, synthetic construct
  source 1..19: mol_type = other RNA
gggcctccttaccagaagg

SEQ ID NO: 1842 - RNA, 19 nt, synthetic construct
  source 1..19: mol_type = other RNA
ggggcctccttaccagaag

SEQ ID NO: 1843 - RNA, 19 nt, synthetic construct
  source 1..19: mol_type = other RNA
cggggcctccttaccagaa

SEQ ID NO: 1844 - RNA, 19 nt, synthetic construct
  source 1..19: mol_type = other RNA
acggggcctccttaccaga

SEQ ID NO: 1845 - RNA, 19 nt, synthetic construct
  source 1..19: mol_type = other RNA
cacggggcctccttaccag

SEQ ID NO: 1846 - RNA, 19 nt, synthetic construct
  source 1..19: mol_type = other RNA
tcacggggcctccttacca

SEQ ID NO: 1847 - RNA, 19 nt, synthetic construct
  source 1..19: mol_type = other RNA
atcacggggcctccttacc

SEQ ID NO: 1848 - RNA, 19 nt, synthetic construct
  source 1..19: mol_type = other RNA
gatcacggggcctccttac

SEQ ID NO: 1849 - RNA, 19 nt, synthetic construct
  source 1..19: mol_type = other RNA
tgatcacggggcctcctta

SEQ ID NO: 1850 - RNA, 19 nt, synthetic construct
  source 1..19: mol_type = other RNA
ctgatcacggggcctcctt

SEQ ID NO: 1851 - RNA, 19 nt, synthetic construct
  source 1..19: mol_type = other RNA
gctgatcacggggcctcct

SEQ ID NO: 1852 - RNA, 19 nt, synthetic construct
  source 1..19: mol_type = other RNA
agctgatcacggggcctcc

SEQ ID NO: 1853 - RNA, 19 nt, synthetic construct
  source 1..19: mol_type = other RNA
gagctgatcacggggcctc

SEQ ID NO: 1854 - RNA, 19 nt, synthetic construct
  source 1..19: mol_type = other RNA
ggagctgatcacggggcct

SEQ ID NO: 1855 - RNA, 19 nt, synthetic construct
  source 1..19: mol_type = other RNA
tggagctgatcacggggcc

SEQ ID NO: 1856 - RNA, 19 nt, synthetic construct
  source 1..19: mol_type = other RNA
ctggagctgatcacggggc

SEQ ID NO: 1857 - RNA, 19 nt, synthetic construct
  source 1..19: mol_type = other RNA
gctggagctgatcacgggg

SEQ ID NO: 1858 - RNA, 19 nt, synthetic construct
  source 1..19: mol_type = other RNA
ggctggagctgatcacggg

SEQ ID NO: 1859 - RNA, 19 nt, synthetic construct
  source 1..19: mol_type = other RNA
tggctggagctgatcacgg

SEQ ID NO: 1860 - RNA, 19 nt, synthetic construct
  source 1..19: mol_type = other RNA
atggctggagctgatcacg

SEQ ID NO: 1861 - RNA, 19 nt, synthetic construct
  source 1..19: mol_type = other RNA
aatggctggagctgatcac

SEQ ID NO: 1862 - RNA, 19 nt, synthetic construct
  source 1..19: mol_type = other RNA
aaatggctggagctgatca

SEQ ID NO: 1863 - RNA, 19 nt, synthetic construct
  source 1..19: mol_type = other RNA
caaatggctggagctgatc

SEQ ID NO: 1864 - RNA, 19 nt, synthetic construct
  source 1..19: mol_type = other RNA
gcaaatggctggagctgat

SEQ ID NO: 1865 - RNA, 19 nt, synthetic construct
  source 1..19: mol_type = other RNA
tgcaaatggctggagctga

SEQ ID NO: 1866 - RNA, 19 nt, synthetic construct
  source 1..19: mol_type = other RNA
ctgcaaatggctggagctg

SEQ ID NO: 1867 - RNA, 19 nt, synthetic construct
  source 1..19: mol_type = other RNA
actgcaaatggctggagct

SEQ ID NO: 1868 - RNA, 19 nt, synthetic construct
  source 1..19: mol_type = other RNA
gactgcaaatggctggagc

SEQ ID NO: 1869 - RNA, 19 nt, synthetic construct
  source 1..19: mol_type = other RNA
ggactgcaaatggctggag

SEQ ID NO: 1870 - RNA, 19 nt, synthetic construct
  source 1..19: mol_type = other RNA
aggactgcaaatggctgga

SEQ ID NO: 1871 - RNA, 19 nt, synthetic construct
  source 1..19: mol_type = other RNA
caggactgcaaatggctgg

SEQ ID NO: 1872 - RNA, 19 nt, synthetic construct
  source 1..19: mol_type = other RNA
ccaggactgcaaatggctg

SEQ ID NO: 1873 - RNA, 19 nt, synthetic construct
  source 1..19: mol_type = other RNA
gccaggactgcaaatggct

SEQ ID NO: 1874 - RNA, 19 nt, synthetic construct
  source 1..19: mol_type = other RNA
agccaggactgcaaatggc

SEQ ID NO: 1875 - RNA, 19 nt, synthetic construct
  source 1..19: mol_type = other RNA
tagccaggactgcaaatgg

SEQ ID NO: 1876 - RNA, 19 nt, synthetic construct
  source 1..19: mol_type = other RNA
atagccaggactgcaaatg

SEQ ID NO: 1877 - RNA, 19 nt, synthetic construct
  source 1..19: mol_type = other RNA
gatagccaggactgcaaat

SEQ ID NO: 1878 - RNA, 19 nt, synthetic construct
  source 1..19: mol_type = other RNA
ggatagccaggactgcaaa

SEQ ID NO: 1879 - RNA, 19 nt, synthetic construct
  source 1..19: mol_type = other RNA
gggatagccaggactgcaa

SEQ ID NO: 1880 - RNA, 19 nt, synthetic construct
  source 1..19: mol_type = other RNA
tgggatagccaggactgca

SEQ ID NO: 1881 - RNA, 19 nt, synthetic construct
  source 1..19: mol_type = other RNA
ctgggatagccaggactgc

SEQ ID NO: 1882 - RNA, 19 nt, synthetic construct
  source 1..19: mol_type = other RNA
cctgggatagccaggactg

SEQ ID NO: 1883 - RNA, 19 nt, synthetic construct
  source 1..19: mol_type = other RNA
tcctgggatagccaggact

SEQ ID NO: 1884 - RNA, 19 nt, synthetic construct
  source 1..19: mol_type = other RNA
ctcctgggatagccaggac

SEQ ID NO: 1885 - RNA, 19 nt, synthetic construct
  source 1..19: mol_type = other RNA
gctcctgggatagccagga

SEQ ID NO: 1886 - RNA, 19 nt, synthetic construct
  source 1..19: mol_type = other RNA
agctcctgggatagccagg

SEQ ID NO: 1887 - RNA, 19 nt, synthetic construct
  source 1..19: mol_type = other RNA
aagctcctgggatagccag

SEQ ID NO: 1888 - RNA, 19 nt, synthetic construct
  source 1..19: mol_type = other RNA
taagctcctgggatagcca

SEQ ID NO: 1889 - RNA, 19 nt, synthetic construct
  source 1..19: mol_type = other RNA
gtaagctcctgggatagcc

SEQ ID NO: 1890 - RNA, 19 nt, synthetic construct
  source 1..19: mol_type = other RNA
tgtaagctcctgggatagc

SEQ ID NO: 1891 - RNA, 19 nt, synthetic construct
  source 1..19: mol_type = other RNA
atgtaagctcctgggatag

SEQ ID NO: 1892 - RNA, 19 nt, synthetic construct
  source 1..19: mol_type = other RNA
tatgtaagctcctgggata

SEQ ID NO: 1893 - RNA, 19 nt, synthetic construct
  source 1..19: mol_type = other RNA
ttatgtaagctcctgggat

SEQ ID NO: 1894 - RNA, 19 nt, synthetic construct
  source 1..19: mol_type = other RNA
tttatgtaagctcctggga

SEQ ID NO: 1895 - RNA, 19 nt, synthetic construct
  source 1..19: mol_type = other RNA
ctttatgtaagctcctggg

SEQ ID NO: 1896 - RNA, 19 nt, synthetic construct
  source 1..19: mol_type = other RNA
cctttatgtaagctcctgg

SEQ ID NO: 1897 - RNA, 19 nt, synthetic construct
  source 1..19: mol_type = other RNA
ccctttatgtaagctcctg

SEQ ID NO: 1898 - RNA, 19 nt, synthetic construct
  source 1..19: mol_type = other RNA
tccctttatgtaagctcct

SEQ ID NO: 1899 - RNA, 19 nt, synthetic construct
  source 1..19: mol_type = other RNA
gtccctttatgtaagctcc

SEQ ID NO: 1900 - RNA, 19 nt, synthetic construct
  source 1..19: mol_type = other RNA
tgtccctttatgtaagctc

SEQ ID NO: 1901 - RNA, 19 nt, synthetic construct
  source 1..19: mol_type = other RNA
ttgtccctttatgtaagct

SEQ ID NO: 1902 - RNA, 19 nt, synthetic construct
  source 1..19: mol_type = other RNA
attgtccctttatgtaagc

SEQ ID NO: 1903 - RNA, 19 nt, synthetic construct
  source 1..19: mol_type = other RNA
aattgtccctttatgtaag

SEQ ID NO: 1904 - RNA, 19 nt, synthetic construct
  source 1..19: mol_type = other RNA
caattgtccctttatgtaa

SEQ ID NO: 1905 - RNA, 19 nt, synthetic construct
  source 1..19: mol_type = other RNA
ccaattgtccctttatgta

SEQ ID NO: 1906 - RNA, 19 nt, synthetic construct
  source 1..19: mol_type = other RNA
tccaattgtccctttatgt

SEQ ID NO: 1907 - RNA, 19 nt, synthetic construct
  source 1..19: mol_type = other RNA
ctccaattgtccctttatg

SEQ ID NO: 1908 - RNA, 19 nt, synthetic construct
  source 1..19: mol_type = other RNA
gctccaattgtccctttat

SEQ ID NO: 1909 - RNA, 19 nt, synthetic construct
  source 1..19: mol_type = other RNA
ggctccaattgtcccttta

SEQ ID NO: 1910 - RNA, 19 nt, synthetic construct
  source 1..19: mol_type = other RNA
aggctccaattgtcccttt

SEQ ID NO: 1911 - RNA, 19 nt, synthetic construct
  source 1..19: mol_type = other RNA
caggctccaattgtccctt

SEQ ID NO: 1912 - RNA, 19 nt, synthetic construct
  source 1..19: mol_type = other RNA
tcaggctccaattgtccct

SEQ ID NO: 1913 - RNA, 19 nt, synthetic construct
  source 1..19: mol_type = other RNA
ctcaggctccaattgtccc

SEQ ID NO: 1914 - RNA, 19 nt, synthetic construct
  source 1..19: mol_type = other RNA
tctcaggctccaattgtcc

SEQ ID NO: 1915 - RNA, 19 nt, synthetic construct
  source 1..19: mol_type = other RNA
ctctcaggctccaattgtc

SEQ ID NO: 1916 - RNA, 19 nt, synthetic construct
  source 1..19: mol_type = other RNA
cctctcaggctccaattgt

SEQ ID NO: 1917 - RNA, 19 nt, synthetic construct
  source 1..19: mol_type = other RNA
acctctcaggctccaattg

SEQ ID NO: 1918 - RNA, 19 nt, synthetic construct
  source 1..19: mol_type = other RNA
cacctctcaggctccaatt

SEQ ID NO: 1919 - RNA, 19 nt, synthetic construct
  source 1..19: mol_type = other RNA
tcacctctcaggctccaat

SEQ ID NO: 1920 - RNA, 19 nt, synthetic construct
  source 1..19: mol_type = other RNA
gtcacctctcaggctccaa

SEQ ID NO: 1921 - RNA, 19 nt, synthetic construct
  source 1..19: mol_type = other RNA
tgtcacctctcaggctcca

SEQ ID NO: 1922 - RNA, 19 nt, synthetic construct
  source 1..19: mol_type = other RNA
ctgtcacctctcaggctcc

SEQ ID NO: 1923 - RNA, 19 nt, synthetic construct
  source 1..19: mol_type = other RNA
actgtcacctctcaggctc

SEQ ID NO: 1924 - RNA, 19 nt, synthetic construct
  source 1..19: mol_type = other RNA
cactgtcacctctcaggct

SEQ ID NO: 1925 - RNA, 19 nt, synthetic construct
  source 1..19: mol_type = other RNA
gcactgtcacctctcaggc

SEQ ID NO: 1926 - RNA, 19 nt, synthetic construct
  source 1..19: mol_type = other RNA
agcactgtcacctctcagg

SEQ ID NO: 1927 - RNA, 19 nt, synthetic construct
  source 1..19: mol_type = other RNA
cagcactgtcacctctcag

SEQ ID NO: 1928 - RNA, 19 nt, synthetic construct
  source 1..19: mol_type = other RNA
tcagcactgtcacctctca

SEQ ID NO: 1929 - RNA, 19 nt, synthetic construct
  source 1..19: mol_type = other RNA
gtcagcactgtcacctctc

SEQ ID NO: 1930 - RNA, 19 nt, synthetic construct
  source 1..19: mol_type = other RNA
tgtcagcactgtcacctct

SEQ ID NO: 1931 - RNA, 19 nt, synthetic construct
  source 1..19: mol_type = other RNA
gtgtcagcactgtcacctc

SEQ ID NO: 1932 - RNA, 19 nt, synthetic construct
  source 1..19: mol_type = other RNA
agtgtcagcactgtcacct

SEQ ID NO: 1933 - RNA, 19 nt, synthetic construct
  source 1..19: mol_type = other RNA
tagtgtcagcactgtcacc

SEQ ID NO: 1934 - RNA, 19 nt, synthetic construct
  source 1..19: mol_type = other RNA
gtagtgtcagcactgtcac

SEQ ID NO: 1935 - RNA, 19 nt, synthetic construct
  source 1..19: mol_type = other RNA
tgtagtgtcagcactgtca

SEQ ID NO: 1936 - RNA, 19 nt, synthetic construct
  source 1..19: mol_type = other RNA
ttgtagtgtcagcactgtc

SEQ ID NO: 1937 - RNA, 19 nt, synthetic construct
  source 1..19: mol_type = other RNA
cttgtagtgtcagcactgt

SEQ ID NO: 1938 - RNA, 19 nt, synthetic construct
  source 1..19: mol_type = other RNA
ccttgtagtgtcagcactg

SEQ ID NO: 1939 - RNA, 19 nt, synthetic construct
  source 1..19: mol_type = other RNA
gccttgtagtgtcagcact

SEQ ID NO: 1940 - RNA, 19 nt, synthetic construct
  source 1..19: mol_type = other RNA
agccttgtagtgtcagcac

SEQ ID NO: 1941 - RNA, 19 nt, synthetic construct
  source 1..19: mol_type = other RNA
gagccttgtagtgtcagca

SEQ ID NO: 1942 - RNA, 19 nt, synthetic construct
  source 1..19: mol_type = other RNA
cgagccttgtagtgtcagc

SEQ ID NO: 1943 - RNA, 19 nt, synthetic construct
  source 1..19: mol_type = other RNA
ccgagccttgtagtgtcag

SEQ ID NO: 1944 - RNA, 19 nt, synthetic construct
  source 1..19: mol_type = other RNA
tccgagccttgtagtgtca

SEQ ID NO: 1945 - RNA, 19 nt, synthetic construct
  source 1..19: mol_type = other RNA
ctccgagccttgtagtgtc

SEQ ID NO: 1946 - RNA, 19 nt, synthetic construct
  source 1..19: mol_type = other RNA
gctccgagccttgtagtgt

SEQ ID NO: 1947 - RNA, 19 nt, synthetic construct
  source 1..19: mol_type = other RNA
agctccgagccttgtagtg

SEQ ID NO: 1948 - RNA, 19 nt, synthetic construct
  source 1..19: mol_type = other RNA
gagctccgagccttgtagt

SEQ ID NO: 1949 - RNA, 19 nt, synthetic construct
  source 1..19: mol_type = other RNA
ggagctccgagccttgtag

SEQ ID NO: 1950 - RNA, 19 nt, synthetic construct
  source 1..19: mol_type = other RNA
cggagctccgagccttgta

SEQ ID NO: 1951 - RNA, 19 nt, synthetic construct
  source 1..19: mol_type = other RNA
ccggagctccgagccttgt

SEQ ID NO: 1952 - RNA, 19 nt, synthetic construct
  source 1..19: mol_type = other RNA
cccggagctccgagccttg

SEQ ID NO: 1953 - RNA, 19 nt, synthetic construct
  source 1..19: mol_type = other RNA
gcccggagctccgagcctt

SEQ ID NO: 1954 - RNA, 19 nt, synthetic construct
  source 1..19: mol_type = other RNA
tgcccggagctccgagcct

SEQ ID NO: 1955 - RNA, 19 nt, synthetic construct
  source 1..19: mol_type = other RNA
gtgcccggagctccgagcc

SEQ ID NO: 1956 - RNA, 19 nt, synthetic construct
  source 1..19: mol_type = other RNA
agtgcccggagctccgagc

SEQ ID NO: 1957 - RNA, 19 nt, synthetic construct
  source 1..19: mol_type = other RNA
gagtgcccggagctccgag

SEQ ID NO: 1958 - RNA, 19 nt, synthetic construct
  source 1..19: mol_type = other RNA
tgagtgcccggagctccga

SEQ ID NO: 1959 - RNA, 19 nt, synthetic construct
  source 1..19: mol_type = other RNA
ctgagtgcccggagctccg

SEQ ID NO: 1960 - RNA, 19 nt, synthetic construct
  source 1..19: mol_type = other RNA
tctgagtgcccggagctcc

SEQ ID NO: 1961 - RNA, 19 nt, synthetic construct
  source 1..19: mol_type = other RNA
gtctgagtgcccggagctc

SEQ ID NO: 1962 - RNA, 19 nt, synthetic construct
  source 1..19: mol_type = other RNA
tgtctgagtgcccggagct

SEQ ID NO: 1963 - RNA, 19 nt, synthetic construct
  source 1..19: mol_type = other RNA
atgtctgagtgcccggagc

SEQ ID NO: 1964 - RNA, 19 nt, synthetic construct
  source 1..19: mol_type = other RNA
gatgtctgagtgcccggag

SEQ ID NO: 1965 - RNA, 19 nt, synthetic construct
  source 1..19: mol_type = other RNA
tgatgtctgagtgcccgga

SEQ ID NO: 1966 - RNA, 19 nt, synthetic construct
  source 1..19: mol_type = other RNA
atgatgtctgagtgcccgg

SEQ ID NO: 1967 - RNA, 19 nt, synthetic construct
  source 1..19: mol_type = other RNA
catgatgtctgagtgcccg

SEQ ID NO: 1968 - RNA, 19 nt, synthetic construct
  source 1..19: mol_type = other RNA
tcatgatgtctgagtgccc

SEQ ID NO: 1969 - RNA, 19 nt, synthetic construct
  source 1..19: mol_type = other RNA
ctcatgatgtctgagtgcc

SEQ ID NO: 1970 - RNA, 19 nt, synthetic construct
  source 1..19: mol_type = other RNA
actcatgatgtctgagtgc

SEQ ID NO: 1971 - RNA, 19 nt, synthetic construct
  source 1..19: mol_type = other RNA
aactcatgatgtctgagtg

SEQ ID NO: 1972 - RNA, 19 nt, synthetic construct
  source 1..19: mol_type = other RNA
caactcatgatgtctgagt

SEQ ID NO: 1973 - RNA, 19 nt, synthetic construct
  source 1..19: mol_type = other RNA
ccaactcatgatgtctgag

SEQ ID NO: 1974 - RNA, 19 nt, synthetic construct
  source 1..19: mol_type = other RNA
accaactcatgatgtctga

SEQ ID NO: 1975 - RNA, 19 nt, synthetic construct
  source 1..19: mol_type = other RNA
gaccaactcatgatgtctg

SEQ ID NO: 1976 - RNA, 19 nt, synthetic construct
  source 1..19: mol_type = other RNA
ggaccaactcatgatgtct

SEQ ID NO: 1977 - RNA, 19 nt, synthetic construct
  source 1..19: mol_type = other RNA
aggaccaactcatgatgtc

SEQ ID NO: 1978 - RNA, 19 nt, synthetic construct
  source 1..19: mol_type = other RNA
aaggaccaactcatgatgt

SEQ ID NO: 1979 - RNA, 19 nt, synthetic construct
  source 1..19: mol_type = other RNA
caaggaccaactcatgatg

SEQ ID NO: 1980 - RNA, 19 nt, synthetic construct
  source 1..19: mol_type = other RNA
gcaaggaccaactcatgat

SEQ ID NO: 1981 - RNA, 19 nt, synthetic construct
  source 1..19: mol_type = other RNA
tgcaaggaccaactcatga

SEQ ID NO: 1982 - RNA, 19 nt, synthetic construct
  source 1..19: mol_type = other RNA
gtgcaaggaccaactcatg

SEQ ID NO: 1983 - RNA, 19 nt, synthetic construct
  source 1..19: mol_type = other RNA
ggtgcaaggaccaactcat

SEQ ID NO: 1984 - RNA, 19 nt, synthetic construct
  source 1..19: mol_type = other RNA
gggtgcaaggaccaactca

SEQ ID NO: 1985 - RNA, 19 nt, synthetic construct
  source 1..19: mol_type = other RNA
ggggtgcaaggaccaactc

SEQ ID NO: 1986 - RNA, 19 nt, synthetic construct
  source 1..19: mol_type = other RNA
gggggtgcaaggaccaact

SEQ ID NO: 1987 - RNA, 19 nt, synthetic construct
  source 1..19: mol_type = other RNA
cgggggtgcaaggaccaac

SEQ ID NO: 1988 - RNA, 19 nt, synthetic construct
  source 1..19: mol_type = other RNA
ccgggggtgcaaggaccaa

SEQ ID NO: 1989 - RNA, 19 nt, synthetic construct
  source 1..19: mol_type = other RNA
tccgggggtgcaaggacca

SEQ ID NO: 1990 - RNA, 19 nt, synthetic construct
  source 1..19: mol_type = other RNA
ttccgggggtgcaaggacc

SEQ ID NO: 1991 - RNA, 19 nt, synthetic construct
  source 1..19: mol_type = other RNA
attccgggggtgcaaggac

SEQ ID NO: 1992 - RNA, 19 nt, synthetic construct
  source 1..19: mol_type = other RNA
aattccgggggtgcaagga

SEQ ID NO: 1993 - RNA, 19 nt, synthetic construct
  source 1..19: mol_type = other RNA
aaattccgggggtgcaagg

SEQ ID NO: 1994 - RNA, 19 nt, synthetic construct
  source 1..19: mol_type = other RNA
taaattccgggggtgcaag

SEQ ID NO: 1995 - RNA, 19 nt, synthetic construct
  source 1..19: mol_type = other RNA
ttaaattccgggggtgcaa

SEQ ID NO: 1996 - RNA, 19 nt, synthetic construct
  source 1..19: mol_type = other RNA
attaaattccgggggtgca

SEQ ID NO: 1997 - RNA, 19 nt, synthetic construct
  source 1..19: mol_type = other RNA
aattaaattccgggggtgc

SEQ ID NO: 1998 - RNA, 19 nt, synthetic construct
  source 1..19: mol_type = other RNA
gaattaaattccgggggtg

SEQ ID NO: 1999 - RNA, 19 nt, synthetic construct
  source 1..19: mol_type = other RNA
agaattaaattccgggggt

SEQ ID NO: 2000 - RNA, 19 nt, synthetic construct
  source 1..19: mol_type = other RNA
gagaattaaattccggggg

SEQ ID NO: 2001 - RNA, 19 nt, synthetic construct
  source 1..19: mol_type = other RNA
agagaattaaattccgggg

SEQ ID NO: 2002 - RNA, 19 nt, synthetic construct
  source 1..19: mol_type = other RNA
tagagaattaaattccggg

SEQ ID NO: 2003 - RNA, 19 nt, synthetic construct
  source 1..19: mol_type = other RNA
gtagagaattaaattccgg

SEQ ID NO: 2004 - RNA, 19 nt, synthetic construct
  source 1..19: mol_type = other RNA
agtagagaattaaattccg

SEQ ID NO: 2005 - RNA, 19 nt, synthetic construct
  source 1..19: mol_type = other RNA
aagtagagaattaaattcc

SEQ ID NO: 2006 - RNA, 19 nt, synthetic construct
  source 1..19: mol_type = other RNA
gaagtagagaattaaattc

SEQ ID NO: 2007 - RNA, 19 nt, synthetic construct
  source 1..19: mol_type = other RNA
agaagtagagaattaaatt

SEQ ID NO: 2008 - RNA, 19 nt, synthetic construct
  source 1..19: mol_type = other RNA
tagaagtagagaattaaat

SEQ ID NO: 2009 - RNA, 19 nt, synthetic construct
  source 1..19: mol_type = other RNA
atagaagtagagaattaaa

SEQ ID NO: 2010 - RNA, 19 nt, synthetic construct
  source 1..19: mol_type = other RNA
catagaagtagagaattaa

SEQ ID NO: 2011 - RNA, 19 nt, synthetic construct
  source 1..19: mol_type = other RNA
gcatagaagtagagaatta

SEQ ID NO: 2012 - RNA, 19 nt, synthetic construct
  source 1..19: mol_type = other RNA
agcatagaagtagagaatt

SEQ ID NO: 2013 - RNA, 19 nt, synthetic construct
  source 1..19: mol_type = other RNA
gagcatagaagtagagaat

SEQ ID NO: 2014 - RNA, 19 nt, synthetic construct
  source 1..19: mol_type = other RNA
agagcatagaagtagagaa

SEQ ID NO: 2015 - RNA, 19 nt, synthetic construct
  source 1..19: mol_type = other RNA
aagagcatagaagtagaga

SEQ ID NO: 2016 - RNA, 19 nt, synthetic construct
  source 1..19: mol_type = other RNA
aaagagcatagaagtagag

SEQ ID NO: 2017 - RNA, 19 nt, synthetic construct
  source 1..19: mol_type = other RNA
aaaagagcatagaagtaga

SEQ ID NO: 2018 - RNA, 19 nt, synthetic construct
  source 1..19: mol_type = other RNA
taaaagagcatagaagtag

SEQ ID NO: 2019 - RNA, 19 nt, synthetic construct
  source 1..19: mol_type = other RNA
ataaaagagcatagaagta

SEQ ID NO: 2020 - RNA, 19 nt, synthetic construct
  source 1..19: mol_type = other RNA
aataaaagagcatagaagt

SEQ ID NO: 2021 - RNA, 19 nt, synthetic construct
  source 1..19: mol_type = other RNA
aaataaaagagcatagaag

SEQ ID NO: 2022 - RNA, 19 nt, synthetic construct
  source 1..19: mol_type = other RNA
gaaataaaagagcatagaa

SEQ ID NO: 2023 - RNA, 19 nt, synthetic construct
  source 1..19: mol_type = other RNA
agaaataaaagagcataga

SEQ ID NO: 2024 - RNA, 19 nt, synthetic construct
  source 1..19: mol_type = other RNA
gagaaataaaagagcatag

SEQ ID NO: 2025 - RNA, 19 nt, synthetic construct
  source 1..19: mol_type = other RNA
agagaaataaaagagcata

SEQ ID NO: 2026 - RNA, 19 nt, synthetic construct
  source 1..19: mol_type = other RNA
gagagaaataaaagagcat

SEQ ID NO: 2027 - RNA, 19 nt, synthetic construct
  source 1..19: mol_type = other RNA
agagagaaataaaagagca

SEQ ID NO: 2028 - RNA, 19 nt, synthetic construct
  source 1..19: mol_type = other RNA
aagagagaaataaaagagc

SEQ ID NO: 2029 - RNA, 19 nt, synthetic construct
  source 1..19: mol_type = other RNA
gaagagagaaataaaagag

SEQ ID NO: 2030 - RNA, 19 nt, synthetic construct
  source 1..19: mol_type = other RNA
tgaagagagaaataaaaga

SEQ ID NO: 2031 - RNA, 19 nt, synthetic construct
  source 1..19: mol_type = other RNA
ttgaagagagaaataaaag

SEQ ID NO: 2032 - RNA, 19 nt, synthetic construct
  source 1..19: mol_type = other RNA
gttgaagagagaaataaaa

SEQ ID NO: 2033 - RNA, 19 nt, synthetic construct
  source 1..19: mol_type = other RNA
tgttgaagagagaaataaa

SEQ ID NO: 2034 - RNA, 19 nt, synthetic construct
  source 1..19: mol_type = other RNA
atgttgaagagagaaataa

SEQ ID NO: 2035 - RNA, 19 nt, synthetic construct
  source 1..19: mol_type = other RNA
catgttgaagagagaaata

SEQ ID NO: 2036 - RNA, 19 nt, synthetic construct
  source 1..19: mol_type = other RNA
acatgttgaagagagaaat

SEQ ID NO: 2037 - RNA, 19 nt, synthetic construct
  source 1..19: mol_type = other RNA
cacatgttgaagagagaaa

SEQ ID NO: 2038 - RNA, 19 nt, synthetic construct
  source 1..19: mol_type = other RNA
acacatgttgaagagagaa

SEQ ID NO: 2039 - RNA, 19 nt, synthetic construct
  source 1..19: mol_type = other RNA
tacacatgttgaagagaga

SEQ ID NO: 2040 - RNA, 19 nt, synthetic construct
  source 1..19: mol_type = other RNA
ctacacatgttgaagagag

SEQ ID NO: 2041 - RNA, 19 nt, synthetic construct
  source 1..19: mol_type = other RNA
gctacacatgttgaagaga

SEQ ID NO: 2042 - RNA, 19 nt, synthetic construct
  source 1..19: mol_type = other RNA
tgctacacatgttgaagag

SEQ ID NO: 2043 - RNA, 19 nt, synthetic construct
  source 1..19: mol_type = other RNA
atgctacacatgttgaaga

SEQ ID NO: 2044 - RNA, 19 nt, synthetic construct
  source 1..19: mol_type = other RNA
tatgctacacatgttgaag

SEQ ID NO: 2045 - RNA, 19 nt, synthetic construct
  source 1..19: mol_type = other RNA
atatgctacacatgttgaa

SEQ ID NO: 2046 - RNA, 19 nt, synthetic construct
  source 1..19: mol_type = other RNA
catatgctacacatgttga

SEQ ID NO: 2047 - RNA, 19 nt, synthetic construct
  source 1..19: mol_type = other RNA
acatatgctacacatgttg

SEQ ID NO: 2048 - RNA, 19 nt, synthetic construct
  source 1..19: mol_type = other RNA
aacatatgctacacatgtt

SEQ ID NO: 2049 - RNA, 19 nt, synthetic construct
  source 1..19: mol_type = other RNA
caacatatgctacacatgt

SEQ ID NO: 2050 - RNA, 19 nt, synthetic construct
  source 1..19: mol_type = other RNA
gcaacatatgctacacatg

SEQ ID NO: 2051 - RNA, 19 nt, synthetic construct
  source 1..19: mol_type = other RNA
agcaacatatgctacacat

SEQ ID NO: 2052 - RNA, 19 nt, synthetic construct
  source 1..19: mol_type = other RNA
tagcaacatatgctacaca

SEQ ID NO: 2053 - RNA, 19 nt, synthetic construct
  source 1..19: mol_type = other RNA
gtagcaacatatgctacac

SEQ ID NO: 2054 - RNA, 19 nt, synthetic construct
  source 1..19: mol_type = other RNA
ggtagcaacatatgctaca

SEQ ID NO: 2055 - RNA, 19 nt, synthetic construct
  source 1..19: mol_type = other RNA
tggtagcaacatatgctac

SEQ ID NO: 2056 - RNA, 19 nt, synthetic construct
  source 1..19: mol_type = other RNA
ctggtagcaacatatgcta

SEQ ID NO: 2057 - RNA, 19 nt, synthetic construct
  source 1..19: mol_type = other RNA
tctggtagcaacatatgct

SEQ ID NO: 2058 - RNA, 19 nt, synthetic construct
  source 1..19: mol_type = other RNA
ctctggtagcaacatatgc

SEQ ID NO: 2059 - RNA, 19 nt, synthetic construct
  source 1..19: mol_type = other RNA
tctctggtagcaacatatg

SEQ ID NO: 2060 - RNA, 19 nt, synthetic construct
  source 1..19: mol_type = other RNA
gtctctggtagcaacatat

SEQ ID NO: 2061 - RNA, 19 nt, synthetic construct
  source 1..19: mol_type = other RNA
tgtctctggtagcaacata

SEQ ID NO: 2062 - RNA, 19 nt, synthetic construct
  source 1..19: mol_type = other RNA
ttgtctctggtagcaacat

SEQ ID NO: 2063 - RNA, 19 nt, synthetic construct
  source 1..19: mol_type = other RNA
gttgtctctggtagcaaca

SEQ ID NO: 2064 - RNA, 19 nt, synthetic construct
  source 1..19: mol_type = other RNA
agttgtctctggtagcaac

SEQ ID NO: 2065 - RNA, 19 nt, synthetic construct
  source 1..19: mol_type = other RNA
cagttgtctctggtagcaa

SEQ ID NO: 2066 - RNA, 19 nt, synthetic construct
  source 1..19: mol_type = other RNA
gcagttgtctctggtagca

SEQ ID NO: 2067 - RNA, 19 nt, synthetic construct
  source 1..19: mol_type = other RNA
agcagttgtctctggtagc

SEQ ID NO: 2068 - RNA, 19 nt, synthetic construct
  source 1..19: mol_type = other RNA
cagcagttgtctctggtag

SEQ ID NO: 2069 - RNA, 19 nt, synthetic construct
  source 1..19: mol_type = other RNA
gcagcagttgtctctggta

SEQ ID NO: 2070 - RNA, 19 nt, synthetic construct
  source 1..19: mol_type = other RNA
tgcagcagttgtctctggt

SEQ ID NO: 2071 - RNA, 19 nt, synthetic construct
  source 1..19: mol_type = other RNA
atgcagcagttgtctctgg

SEQ ID NO: 2072 - RNA, 19 nt, synthetic construct
  source 1..19: mol_type = other RNA
gatgcagcagttgtctctg

SEQ ID NO: 2073 - RNA, 19 nt, synthetic construct
  source 1..19: mol_type = other RNA
agatgcagcagttgtctct

SEQ ID NO: 2074 - RNA, 19 nt, synthetic construct
  source 1..19: mol_type = other RNA
aagatgcagcagttgtctc

SEQ ID NO: 2075 - RNA, 19 nt, synthetic construct
  source 1..19: mol_type = other RNA
taagatgcagcagttgtct

SEQ ID NO: 2076 - RNA, 19 nt, synthetic construct
  source 1..19: mol_type = other RNA
ctaagatgcagcagttgtc

SEQ ID NO: 2077 - RNA, 19 nt, synthetic construct
  source 1..19: mol_type = other RNA
tctaagatgcagcagttgt

SEQ ID NO: 2078 - RNA, 19 nt, synthetic construct
  source 1..19: mol_type = other RNA
atctaagatgcagcagttg

SEQ ID NO: 2079 - RNA, 19 nt, synthetic construct
  source 1..19: mol_type = other RNA
catctaagatgcagcagtt

SEQ ID NO: 2080 - RNA, 19 nt, synthetic construct
  source 1..19: mol_type = other RNA
tcatctaagatgcagcagt

SEQ ID NO: 2081 - RNA, 19 nt, synthetic construct
  source 1..19: mol_type = other RNA
ttcatctaagatgcagcag

SEQ ID NO: 2082 - RNA, 19 nt, synthetic construct
  source 1..19: mol_type = other RNA
tttcatctaagatgcagca

SEQ ID NO: 2083 - RNA, 19 nt, synthetic construct
  source 1..19: mol_type = other RNA
ctttcatctaagatgcagc

SEQ ID NO: 2084 - RNA, 19 nt, synthetic construct
  source 1..19: mol_type = other RNA
tctttcatctaagatgcag

SEQ ID NO: 2085 - RNA, 19 nt, synthetic construct
  source 1..19: mol_type = other RNA
atctttcatctaagatgca

SEQ ID NO: 2086 - RNA, 19 nt, synthetic construct
  source 1..19: mol_type = other RNA
aatctttcatctaagatgc

SEQ ID NO: 2087 - RNA, 19 nt, synthetic construct
  source 1..19: mol_type = other RNA
gaatctttcatctaagatg

SEQ ID NO: 2088 - RNA, 19 nt, synthetic construct
  source 1..19: mol_type = other RNA
cgaatctttcatctaagat

SEQ ID NO: 2089 - RNA, 19 nt, synthetic construct
  source 1..19: mol_type = other RNA
ccgaatctttcatctaaga

SEQ ID NO: 2090 - RNA, 19 nt, synthetic construct
  source 1..19: mol_type = other RNA
accgaatctttcatctaag

SEQ ID NO: 2091 - RNA, 19 nt, synthetic construct
  source 1..19: mol_type = other RNA
taccgaatctttcatctaa

SEQ ID NO: 2092 - RNA, 19 nt, synthetic construct
  source 1..19: mol_type = other RNA
ctaccgaatctttcatcta

SEQ ID NO: 2093 - RNA, 19 nt, synthetic construct
  source 1..19: mol_type = other RNA
actaccgaatctttcatct

SEQ ID NO: 2094 - RNA, 19 nt, synthetic construct
  source 1..19: mol_type = other RNA
aactaccgaatctttcatc

SEQ ID NO: 2095 - RNA, 19 nt, synthetic construct
  source 1..19: mol_type = other RNA
taactaccgaatctttcat

SEQ ID NO: 2096 - RNA, 19 nt, synthetic construct
  source 1..19: mol_type = other RNA
ataactaccgaatctttca

SEQ ID NO: 2097 - RNA, 19 nt, synthetic construct
  source 1..19: mol_type = other RNA
aataactaccgaatctttc

SEQ ID NO: 2098 - RNA, 19 nt, synthetic construct
  source 1..19: mol_type = other RNA
caataactaccgaatcttt

SEQ ID NO: 2099 - RNA, 19 nt, synthetic construct
  source 1..19: mol_type = other RNA
acaataactaccgaatctt

SEQ ID NO: 2100 - RNA, 19 nt, synthetic construct
  source 1..19: mol_type = other RNA
gacaataactaccgaatct

SEQ ID NO: 2101 - RNA, 19 nt, synthetic construct
  source 1..19: mol_type = other RNA
ggacaataactaccgaatc

SEQ ID NO: 2102 - RNA, 19 nt, synthetic construct
  source 1..19: mol_type = other RNA
tggacaataactaccgaat

SEQ ID NO: 2103 - RNA, 19 nt, synthetic construct
  source 1..19: mol_type = other RNA
ttggacaataactaccgaa

SEQ ID NO: 2104 - RNA, 19 nt, synthetic construct
  source 1..19: mol_type = other RNA
gttggacaataactaccga

SEQ ID NO: 2105 - RNA, 19 nt, synthetic construct
  source 1..19: mol_type = other RNA
agttggacaataactaccg

SEQ ID NO: 2106 - RNA, 19 nt, synthetic construct
  source 1..19: mol_type = other RNA
tagttggacaataactacc

SEQ ID NO: 2107 - RNA, 19 nt, synthetic construct
  source 1..19: mol_type = other RNA
gtagttggacaataactac

SEQ ID NO: 2108 - RNA, 19 nt, synthetic construct
  source 1..19: mol_type = other RNA
ggtagttggacaataacta

SEQ ID NO: 2109 - RNA, 19 nt, synthetic construct
  source 1..19: mol_type = other RNA
aggtagttggacaataact

SEQ ID NO: 2110 - RNA, 19 nt, synthetic construct
  source 1..19: mol_type = other RNA
caggtagttggacaataac

SEQ ID NO: 2111 - RNA, 19 nt, synthetic construct
  source 1..19: mol_type = other RNA
acaggtagttggacaataa

SEQ ID NO: 2112 - RNA, 19 nt, synthetic construct
  source 1..19: mol_type = other RNA
cacaggtagttggacaata

SEQ ID NO: 2113 - RNA, 19 nt, synthetic construct
  source 1..19: mol_type = other RNA
ccacaggtagttggacaat

SEQ ID NO: 2114 - RNA, 19 nt, synthetic construct
  source 1..19: mol_type = other RNA
gccacaggtagttggacaa

SEQ ID NO: 2115 - RNA, 19 nt, synthetic construct
  source 1..19: mol_type = other RNA
tgccacaggtagttggaca

SEQ ID NO: 2116 - RNA, 19 nt, synthetic construct
  source 1..19: mol_type = other RNA
atgccacaggtagttggac

SEQ ID NO: 2117 - RNA, 19 nt, synthetic construct
  source 1..19: mol_type = other RNA
aatgccacaggtagttgga

SEQ ID NO: 2118 - RNA, 19 nt, synthetic construct
  source 1..19: mol_type = other RNA
caatgccacaggtagttgg

SEQ ID NO: 2119 - RNA, 19 nt, synthetic construct
  source 1..19: mol_type = other RNA
gcaatgccacaggtagttg

SEQ ID NO: 2120 - RNA, 19 nt, synthetic construct
  source 1..19: mol_type = other RNA
tgcaatgccacaggtagtt

SEQ ID NO: 2121 - RNA, 19 nt, synthetic construct
  source 1..19: mol_type = other RNA
ctgcaatgccacaggtagt

SEQ ID NO: 2122 - RNA, 19 nt, synthetic construct
  source 1..19: mol_type = other RNA
tctgcaatgccacaggtag

SEQ ID NO: 2123 - RNA, 19 nt, synthetic construct
  source 1..19: mol_type = other RNA
atctgcaatgccacaggta

SEQ ID NO: 2124 - RNA, 19 nt, synthetic construct
  source 1..19: mol_type = other RNA
aatctgcaatgccacaggt

SEQ ID NO: 2125 - RNA, 19 nt, synthetic construct
  source 1..19: mol_type = other RNA
aaatctgcaatgccacagg

SEQ ID NO: 2126 - RNA, 19 nt, synthetic construct
  source 1..19: mol_type = other RNA
gaaatctgcaatgccacag

SEQ ID NO: 2127 - RNA, 19 nt, synthetic construct
  source 1..19: mol_type = other RNA
ggaaatctgcaatgccaca

SEQ ID NO: 2128 - RNA, 19 nt, synthetic construct
  source 1..19: mol_type = other RNA
aggaaatctgcaatgccac

SEQ ID NO: 2129 - RNA, 19 nt, synthetic construct
  source 1..19: mol_type = other RNA
caggaaatctgcaatgcca

SEQ ID NO: 2130 - RNA, 19 nt, synthetic construct
  source 1..19: mol_type = other RNA
acaggaaatctgcaatgcc

SEQ ID NO: 2131 - RNA, 19 nt, synthetic construct
  source 1..19: mol_type = other RNA
gacaggaaatctgcaatgc

SEQ ID NO: 2132 - RNA, 19 nt, synthetic construct
  source 1..19: mol_type = other RNA
agacaggaaatctgcaatg

SEQ ID NO: 2133 - RNA, 19 nt, synthetic construct
  source 1..19: mol_type = other RNA
tagacaggaaatctgcaat

SEQ ID NO: 2134 - RNA, 19 nt, synthetic construct
  source 1..19: mol_type = other RNA
gtagacaggaaatctgcaa

SEQ ID NO: 2135 - RNA, 19 nt, synthetic construct
  source 1..19: mol_type = other RNA
agtagacaggaaatctgca

SEQ ID NO: 2136 - RNA, 19 nt, synthetic construct
  source 1..19: mol_type = other RNA
aagtagacaggaaatctgc

SEQ ID NO: 2137 - RNA, 19 nt, synthetic construct
  source 1..19: mol_type = other RNA
taagtagacaggaaatctg

SEQ ID NO: 2138 - RNA, 19 nt, synthetic construct
  source 1..19: mol_type = other RNA
ataagtagacaggaaatct

SEQ ID NO: 2139 - RNA, 19 nt, synthetic construct
  source 1..19: mol_type = other RNA
gataagtagacaggaaatc

SEQ ID NO: 2140 - RNA, 19 nt, synthetic construct
  source 1..19: mol_type = other RNA
tgataagtagacaggaaat

SEQ ID NO: 2141 - RNA, 19 nt, synthetic construct
  source 1..19: mol_type = other RNA
ttgataagtagacaggaaa

SEQ ID NO: 2142 - RNA, 19 nt, synthetic construct
  source 1..19: mol_type = other RNA
tttgataagtagacaggaa

SEQ ID NO: 2143 - RNA, 19 nt, synthetic construct
  source 1..19: mol_type = other RNA
gtttgataagtagacagga

SEQ ID NO: 2144 - RNA, 19 nt, synthetic construct
  source 1..19: mol_type = other RNA
ggtttgataagtagacagg

SEQ ID NO: 2145 - RNA, 19 nt, synthetic construct
  source 1..19: mol_type = other RNA
tggtttgataagtagacag

SEQ ID NO: 2146 - RNA, 19 nt, synthetic construct
  source 1..19: mol_type = other RNA
ttggtttgataagtagaca

SEQ ID NO: 2147 - RNA, 19 nt, synthetic construct
  source 1..19: mol_type = other RNA
tttggtttgataagtagac

SEQ ID NO: 2148 - RNA, 19 nt, synthetic construct
  source 1..19: mol_type = other RNA
ctttggtttgataagtaga

SEQ ID NO: 2149 - RNA, 19 nt, synthetic construct
  source 1..19: mol_type = other RNA
actttggtttgataagtag

SEQ ID NO: 2150 - RNA, 19 nt, synthetic construct
  source 1..19: mol_type = other RNA
tactttggtttgataagta

SEQ ID NO: 2151 - RNA, 19 nt, synthetic construct
  source 1..19: mol_type = other RNA
ctactttggtttgataagt

SEQ ID NO: 2152 - RNA, 19 nt, synthetic construct
  source 1..19: mol_type = other RNA
tctactttggtttgataag

SEQ ID NO: 2153 - RNA, 19 nt, synthetic construct
  source 1..19: mol_type = other RNA
gtctactttggtttgataa

SEQ ID NO: 2154 - RNA, 19 nt, synthetic construct
  source 1..19: mol_type = other RNA
tgtctactttggtttgata

SEQ ID NO: 2155 - RNA, 19 nt, synthetic construct
  source 1..19: mol_type = other RNA
ttgtctactttggtttgat

SEQ ID NO: 2156 - RNA, 19 nt, synthetic construct
  source 1..19: mol_type = other RNA
cttgtctactttggtttga

SEQ ID NO: 2157 - RNA, 19 nt, synthetic construct
  source 1..19: mol_type = other RNA
ccttgtctactttggtttg

SEQ ID NO: 2158 - RNA, 19 nt, synthetic construct
  source 1..19: mol_type = other RNA
tccttgtctactttggttt

SEQ ID NO: 2159 - RNA, 19 nt, synthetic construct
  source 1..19: mol_type = other RNA
atccttgtctactttggtt

SEQ ID NO: 2160 - RNA, 19 nt, synthetic construct
  source 1..19: mol_type = other RNA
gatccttgtctactttggt

SEQ ID NO: 2161 - RNA, 19 nt, synthetic construct
  source 1..19: mol_type = other RNA
agatccttgtctactttgg

SEQ ID NO: 2162 - RNA, 19 nt, synthetic construct
  source 1..19: mol_type = other RNA
tagatccttgtctactttg

SEQ ID NO: 2163 - RNA, 19 nt, synthetic construct
  source 1..19: mol_type = other RNA
gtagatccttgtctacttt

SEQ ID NO: 2164 - RNA, 19 nt, synthetic construct
  source 1..19: mol_type = other RNA
tgtagatccttgtctactt

SEQ ID NO: 2165 - RNA, 19 nt, synthetic construct
  source 1..19: mol_type = other RNA
ctgtagatccttgtctact

SEQ ID NO: 2166 - RNA, 19 nt, synthetic construct
  source 1..19: mol_type = other RNA
actgtagatccttgtctac

SEQ ID NO: 2167 - RNA, 19 nt, synthetic construct
  source 1..19: mol_type = other RNA
gactgtagatccttgtcta

SEQ ID NO: 2168 - RNA, 19 nt, synthetic construct
  source 1..19: mol_type = other RNA
agactgtagatccttgtct

SEQ ID NO: 2169 - RNA, 19 nt, synthetic construct
  source 1..19: mol_type = other RNA
aagactgtagatccttgtc

SEQ ID NO: 2170 - RNA, 19 nt, synthetic construct
  source 1..19: mol_type = other RNA
aaagactgtagatccttgt

SEQ ID NO: 2171 - RNA, 19 nt, synthetic construct
  source 1..19: mol_type = other RNA
caaagactgtagatccttg

SEQ ID NO: 2172 - RNA, 19 nt, synthetic construct
  source 1..19: mol_type = other RNA
ccaaagactgtagatcctt

SEQ ID NO: 2173 - RNA, 19 nt, synthetic construct
  source 1..19: mol_type = other RNA
tccaaagactgtagatcct

SEQ ID NO: 2174 - RNA, 19 nt, synthetic construct
  source 1..19: mol_type = other RNA
ttccaaagactgtagatcc

SEQ ID NO: 2175 - RNA, 19 nt, synthetic construct
  source 1..19: mol_type = other RNA
cttccaaagactgtagatc

SEQ ID NO: 2176 - RNA, 19 nt, synthetic construct
  source 1..19: mol_type = other RNA
tcttccaaagactgtagat

SEQ ID NO: 2177 - RNA, 19 nt, synthetic construct
  source 1..19: mol_type = other RNA
gtcttccaaagactgtaga

SEQ ID NO: 2178 - RNA, 19 nt, synthetic construct
  source 1..19: mol_type = other RNA
tgtcttccaaagactgtag

SEQ ID NO: 2179 - RNA, 19 nt, synthetic construct
  source 1..19: mol_type = other RNA
atgtcttccaaagactgta

SEQ ID NO: 2180 - RNA, 19 nt, synthetic construct
  source 1..19: mol_type = other RNA
gatgtcttccaaagactgt

SEQ ID NO: 2181 - RNA, 19 nt, synthetic construct
  source 1..19: mol_type = other RNA
agatgtcttccaaagactg

SEQ ID NO: 2182 - RNA, 19 nt, synthetic construct
  source 1..19: mol_type = other RNA
aagatgtcttccaaagact

SEQ ID NO: 2183 - RNA, 19 nt, synthetic construct
  source 1..19: mol_type = other RNA
taagatgtcttccaaagac

SEQ ID NO: 2184 - RNA, 19 nt, synthetic construct
  source 1..19: mol_type = other RNA
gtaagatgtcttccaaaga

SEQ ID NO: 2185 - RNA, 19 nt, synthetic construct
  source 1..19: mol_type = other RNA
tgtaagatgtcttccaaag

SEQ ID NO: 2186 - RNA, 19 nt, synthetic construct
  source 1..19: mol_type = other RNA
atgtaagatgtcttccaaa

SEQ ID NO: 2187 - RNA, 19 nt, synthetic construct
  source 1..19: mol_type = other RNA
gatgtaagatgtcttccaa

SEQ ID NO: 2188 - RNA, 19 nt, synthetic construct
  source 1..19: mol_type = other RNA
tgatgtaagatgtcttcca

SEQ ID NO: 2189 - RNA, 19 nt, synthetic construct
  source 1..19: mol_type = other RNA
ttgatgtaagatgtcttcc

SEQ ID NO: 2190 - RNA, 19 nt, synthetic construct
  source 1..19: mol_type = other RNA
cttgatgtaagatgtcttc

SEQ ID NO: 2191 - RNA, 19 nt, synthetic construct
  source 1..19: mol_type = other RNA
acttgatgtaagatgtctt

SEQ ID NO: 2192 - RNA, 19 nt, synthetic construct
  source 1..19: mol_type = other RNA
aacttgatgtaagatgtct

SEQ ID NO: 2193 - RNA, 19 nt, synthetic construct
  source 1..19: mol_type = other RNA
caacttgatgtaagatgtc

SEQ ID NO: 2194 - RNA, 19 nt, synthetic construct
  source 1..19: mol_type = other RNA
tcaacttgatgtaagatgt

SEQ ID NO: 2195 - RNA, 19 nt, synthetic construct
  source 1..19: mol_type = other RNA
ttcaacttgatgtaagatg

SEQ ID NO: 2196 - RNA, 19 nt, synthetic construct
  source 1..19: mol_type = other RNA
tttcaacttgatgtaagat

SEQ ID NO: 2197 - RNA, 19 nt, synthetic construct
  source 1..19: mol_type = other RNA
ttttcaacttgatgtaaga

SEQ ID NO: 2198 - RNA, 19 nt, synthetic construct
  source 1..19: mol_type = other RNA
gttttcaacttgatgtaag

SEQ ID NO: 2199 - RNA, 19 nt, synthetic construct
  source 1..19: mol_type = other RNA
tgttttcaacttgatgtaa

SEQ ID NO: 2200 - RNA, 19 nt, synthetic construct
  source 1..19: mol_type = other RNA
ttgttttcaacttgatgta

SEQ ID NO: 2201 - RNA, 19 nt, synthetic construct
  source 1..19: mol_type = other RNA
tttgttttcaacttgatgt

SEQ ID NO: 2202 - RNA, 19 nt, synthetic construct
  source 1..19: mol_type = other RNA
ttttgttttcaacttgatg

SEQ ID NO: 2203 - RNA, 19 nt, synthetic construct
  source 1..19: mol_type = other RNA
gttttgttttcaacttgat

SEQ ID NO: 2204 - RNA, 19 nt, synthetic construct
  source 1..19: mol_type = other RNA
tgttttgttttcaacttga

SEQ ID NO: 2205 - RNA, 19 nt, synthetic construct
  source 1..19: mol_type = other RNA
atgttttgttttcaacttg

SEQ ID NO: 2206 - RNA, 19 nt, synthetic construct
  source 1..19: mol_type = other RNA
gatgttttgttttcaactt

SEQ ID NO: 2207 - RNA, 19 nt, synthetic construct
  source 1..19: mol_type = other RNA
tgatgttttgttttcaact

SEQ ID NO: 2208 - RNA, 19 nt, synthetic construct
  source 1..19: mol_type = other RNA
ctgatgttttgttttcaac

SEQ ID NO: 2209 - RNA, 19 nt, synthetic construct
  source 1..19: mol_type = other RNA
tctgatgttttgttttcaa

SEQ ID NO: 2210 - RNA, 19 nt, synthetic construct
  source 1..19: mol_type = other RNA
ttctgatgttttgttttca

SEQ ID NO: 2211 - RNA, 19 nt, synthetic construct
  source 1..19: mol_type = other RNA
cttctgatgttttgttttc

SEQ ID NO: 2212 - RNA, 19 nt, synthetic construct
  source 1..19: mol_type = other RNA
acttctgatgttttgtttt

SEQ ID NO: 2213 - RNA, 19 nt, synthetic construct
  source 1..19: mol_type = other RNA
gacttctgatgttttgttt

SEQ ID NO: 2214 - RNA, 19 nt, synthetic construct
  source 1..19: mol_type = other RNA
tgacttctgatgttttgtt

SEQ ID NO: 2215 - RNA, 19 nt, synthetic construct
  source 1..19: mol_type = other RNA
ttgacttctgatgttttgt

SEQ ID NO: 2216 - RNA, 19 nt, synthetic construct
  source 1..19: mol_type = other RNA
tttgacttctgatgttttg

SEQ ID NO: 2217 - RNA, 19 nt, synthetic construct
  source 1..19: mol_type = other RNA
gtttgacttctgatgtttt

SEQ ID NO: 2218 - RNA, 19 nt, synthetic construct
  source 1..19: mol_type = other RNA
tgtttgacttctgatgttt

SEQ ID NO: 2219 - RNA, 19 nt, synthetic construct
  source 1..19: mol_type = other RNA
ctgtttgacttctgatgtt

SEQ ID NO: 2220 - RNA, 19 nt, synthetic construct
  source 1..19: mol_type = other RNA
gctgtttgacttctgatgt

SEQ ID NO: 2221 - RNA, 19 nt, synthetic construct
  source 1..19: mol_type = other RNA
agctgtttgacttctgatg

SEQ ID NO: 2222 - RNA, 19 nt, synthetic construct
  source 1..19: mol_type = other RNA
cagctgtttgacttctgat

SEQ ID NO: 2223 - RNA, 19 nt, synthetic construct
  source 1..19: mol_type = other RNA
tcagctgtttgacttctga

SEQ ID NO: 2224 - RNA, 19 nt, synthetic construct
  source 1..19: mol_type = other RNA
atcagctgtttgacttctg

SEQ ID NO: 2225 - RNA, 19 nt, synthetic construct
  source 1..19: mol_type = other RNA
tatcagctgtttgacttct

SEQ ID NO: 2226 - RNA, 19 nt, synthetic construct
  source 1..19: mol_type = other RNA
ttatcagctgtttgacttc

SEQ ID NO: 2227 - RNA, 19 nt, synthetic construct
  source 1..19: mol_type = other RNA
tttatcagctgtttgactt

SEQ ID NO: 2228 - RNA, 19 nt, synthetic construct
  source 1..19: mol_type = other RNA
ttttatcagctgtttgact

SEQ ID NO: 2229 - RNA, 19 nt, synthetic construct
  source 1..19: mol_type = other RNA
cttttatcagctgtttgac

SEQ ID NO: 2230 - RNA, 19 nt, synthetic construct
  source 1..19: mol_type = other RNA
gcttttatcagctgtttga

SEQ ID NO: 2231 - RNA, 19 nt, synthetic construct
  source 1..19: mol_type = other RNA
tgcttttatcagctgtttg

SEQ ID NO: 2232 - RNA, 19 nt, synthetic construct
  source 1..19: mol_type = other RNA
ttgcttttatcagctgttt

SEQ ID NO: 2233 - RNA, 19 nt, synthetic construct
  source 1..19: mol_type = other RNA
attgcttttatcagctgtt

SEQ ID NO: 2234 - RNA, 19 nt, synthetic construct
  source 1..19: mol_type = other RNA
gattgcttttatcagctgt

SEQ ID NO: 2235 - RNA, 19 nt, synthetic construct
  source 1..19: mol_type = other RNA
ggattgcttttatcagctg

SEQ ID NO: 2236 - RNA, 19 nt, synthetic construct
  source 1..19: mol_type = other RNA
tggattgcttttatcagct

SEQ ID NO: 2237 - RNA, 19 nt, synthetic construct
  source 1..19: mol_type = other RNA
ttggattgcttttatcagc

SEQ ID NO: 2238 - RNA, 19 nt, synthetic construct
  source 1..19: mol_type = other RNA
gttggattgcttttatcag

SEQ ID NO: 2239 - RNA, 19 nt, synthetic construct
  source 1..19: mol_type = other RNA
agttggattgcttttatca

SEQ ID NO: 2240 - RNA, 19 nt, synthetic construct
  source 1..19: mol_type = other RNA
gagttggattgcttttatc

SEQ ID NO: 2241 - RNA, 19 nt, synthetic construct
  source 1..19: mol_type = other RNA
tgagttggattgcttttat

SEQ ID NO: 2242 - RNA, 19 nt, synthetic construct
  source 1..19: mol_type = other RNA
gtgagttggattgctttta

SEQ ID NO: 2243 - RNA, 19 nt, synthetic construct
  source 1..19: mol_type = other RNA
agtgagttggattgctttt

SEQ ID NO: 2244 - RNA, 19 nt, synthetic construct
  source 1..19: mol_type = other RNA
aagtgagttggattgcttt

SEQ ID NO: 2245 - RNA, 19 nt, synthetic construct
  source 1..19: mol_type = other RNA
taagtgagttggattgctt

SEQ ID NO: 2246 - RNA, 19 nt, synthetic construct
  source 1..19: mol_type = other RNA
ataagtgagttggattgct

SEQ ID NO: 2247 - RNA, 19 nt, synthetic construct
  source 1..19: mol_type = other RNA
tataagtgagttggattgc

SEQ ID NO: 2248 - RNA, 19 nt, synthetic construct
  source 1..19: mol_type = other RNA
ttataagtgagttggattg

SEQ ID NO: 2249 - RNA, 19 nt, synthetic construct
  source 1..19: mol_type = other RNA
attataagtgagttggatt

SEQ ID NO: 2250 - RNA, 19 nt, synthetic construct
  source 1..19: mol_type = other RNA
gattataagtgagttggat

SEQ ID NO: 2251 - RNA, 19 nt, synthetic construct
  source 1..19: mol_type = other RNA
ggattataagtgagttgga

SEQ ID NO: 2252 - RNA, 19 nt, synthetic construct
  source 1..19: mol_type = other RNA
aggattataagtgagttgg

SEQ ID NO: 2253 - RNA, 19 nt, synthetic construct
  source 1..19: mol_type = other RNA
caggattataagtgagttg

SEQ ID NO: 2254 - RNA, 19 nt, synthetic construct
  source 1..19: mol_type = other RNA
tcaggattataagtgagtt

SEQ ID NO: 2255 - RNA, 19 nt, synthetic construct
  source 1..19: mol_type = other RNA
atcaggattataagtgagt

SEQ ID NO: 2256 - RNA, 19 nt, synthetic construct
  source 1..19: mol_type = other RNA
catcaggattataagtgag

SEQ ID NO: 2257 - RNA, 19 nt, synthetic construct
  source 1..19: mol_type = other RNA
tcatcaggattataagtga

SEQ ID NO: 2258 - RNA, 19 nt, synthetic construct
  source 1..19: mol_type = other RNA
ttcatcaggattataagtg

SEQ ID NO: 2259 - RNA, 19 nt, synthetic construct
  source 1..19: mol_type = other RNA
attcatcaggattataagt

SEQ ID NO: 2260 - RNA, 19 nt, synthetic construct
  source 1..19: mol_type = other RNA
gattcatcaggattataag

SEQ ID NO: 2261 - RNA, 19 nt, synthetic construct
  source 1..19: mol_type = other RNA
tgattcatcaggattataa

SEQ ID NO: 2262 - RNA, 19 nt, synthetic construct
  source 1..19: mol_type = other RNA
atgattcatcaggattata

SEQ ID NO: 2263 - RNA, 19 nt, synthetic construct
  source 1..19: mol_type = other RNA
gatgattcatcaggattat

SEQ ID NO: 2264 - RNA, 19 nt, synthetic construct
  source 1..19: mol_type = other RNA
tgatgattcatcaggatta

SEQ ID NO: 2265 - RNA, 19 nt, synthetic construct
  source 1..19: mol_type = other RNA
ttgatgattcatcaggatt

SEQ ID NO: 2266 - RNA, 19 nt, synthetic construct
  source 1..19: mol_type = other RNA
tttgatgattcatcaggat

SEQ ID NO: 2267 - RNA, 19 nt, synthetic construct
  source 1..19: mol_type = other RNA
ttttgatgattcatcagga

SEQ ID NO: 2268 - RNA, 19 nt, synthetic construct
  source 1..19: mol_type = other RNA
gttttgatgattcatcagg

SEQ ID NO: 2269 - RNA, 19 nt, synthetic construct
  source 1..19: mol_type = other RNA
ggttttgatgattcatcag

SEQ ID NO: 2270 - RNA, 19 nt, synthetic construct
  source 1..19: mol_type = other RNA
tggttttgatgattcatca

SEQ ID NO: 2271 - RNA, 19 nt, synthetic construct
  source 1..19: mol_type = other RNA
ttggttttgatgattcatc

SEQ ID NO: 2272 - RNA, 19 nt, synthetic construct
  source 1..19: mol_type = other RNA
tttggttttgatgattcat

SEQ ID NO: 2273 - RNA, 19 nt, synthetic construct
  source 1..19: mol_type = other RNA
atttggttttgatgattca

SEQ ID NO: 2274 - RNA, 19 nt, synthetic construct
  source 1..19: mol_type = other RNA
tatttggttttgatgattc

SEQ ID NO: 2275 - RNA, 19 nt, synthetic construct
  source 1..19: mol_type = other RNA
atatttggttttgatgatt

SEQ ID NO: 2276 - RNA, 19 nt, synthetic construct
  source 1..19: mol_type = other RNA
catatttggttttgatgat

SEQ ID NO: 2277 - RNA, 19 nt, synthetic construct
  source 1..19: mol_type = other RNA
tcatatttggttttgatga

SEQ ID NO: 2278 - RNA, 19 nt, synthetic construct
  source 1..19: mol_type = other RNA
atcatatttggttttgatg

SEQ ID NO: 2279 - RNA, 19 nt, synthetic construct
  source 1..19: mol_type = other RNA
tatcatatttggttttgat

SEQ ID NO: 2280 - RNA, 19 nt, synthetic construct
  source 1..19: mol_type = other RNA
ctatcatatttggttttga

SEQ ID NO: 2281 - RNA, 19 nt, synthetic construct
  source 1..19: mol_type = other RNA
tctatcatatttggttttg

SEQ ID NO: 2282 - RNA, 19 nt, synthetic construct
  source 1..19: mol_type = other RNA
gtctatcatatttggtttt

SEQ ID NO: 2283 - RNA, 19 nt, synthetic construct
  source 1..19: mol_type = other RNA
cgtctatcatatttggttt

SEQ ID NO: 2284 - RNA, 19 nt, synthetic construct
  source 1..19: mol_type = other RNA
gcgtctatcatatttggtt

SEQ ID NO: 2285 - RNA, 19 nt, synthetic construct
  source 1..19: mol_type = other RNA
agcgtctatcatatttggt

SEQ ID NO: 2286 - RNA, 19 nt, synthetic construct
  source 1..19: mol_type = other RNA
cagcgtctatcatatttgg

SEQ ID NO: 2287 - RNA, 19 nt, synthetic construct
  source 1..19: mol_type = other RNA
gcagcgtctatcatatttg

SEQ ID NO: 2288 - RNA, 19 nt, synthetic construct
  source 1..19: mol_type = other RNA
agcagcgtctatcatattt

SEQ ID NO: 2289 - RNA, 19 nt, synthetic construct
  source 1..19: mol_type = other RNA
tagcagcgtctatcatatt

SEQ ID NO: 2290 - RNA, 19 nt, synthetic construct
  source 1..19: mol_type = other RNA
gtagcagcgtctatcatat

SEQ ID NO: 2291 - RNA, 19 nt, synthetic construct
  source 1..19: mol_type = other RNA
agtagcagcgtctatcata

SEQ ID NO: 2292 - RNA, 19 nt, synthetic construct
  source 1..19: mol_type = other RNA
aagtagcagcgtctatcat

SEQ ID NO: 2293 - RNA, 19 nt, synthetic construct
  source 1..19: mol_type = other RNA
aaagtagcagcgtctatca

SEQ ID NO: 2294 - RNA, 19 nt, synthetic construct
  source 1..19: mol_type = other RNA
caaagtagcagcgtctatc

SEQ ID NO: 2295 - RNA, 19 nt, synthetic construct
  source 1..19: mol_type = other RNA
tcaaagtagcagcgtctat

SEQ ID NO: 2296 - RNA, 19 nt, synthetic construct
  source 1..19: mol_type = other RNA
ttcaaagtagcagcgtcta

SEQ ID NO: 2297 - RNA, 19 nt, synthetic construct
  source 1..19: mol_type = other RNA
cttcaaagtagcagcgtct

SEQ ID NO: 2298 - RNA, 19 nt, synthetic construct
  source 1..19: mol_type = other RNA
acttcaaagtagcagcgtc

SEQ ID NO: 2299 - RNA, 19 nt, synthetic construct
  source 1..19: mol_type = other RNA
gacttcaaagtagcagcgt

SEQ ID NO: 2300 - RNA, 19 nt, synthetic construct
  source 1..19: mol_type = other RNA
ggacttcaaagtagcagcg

SEQ ID NO: 2301 - RNA, 19 nt, synthetic construct
  source 1..19: mol_type = other RNA
tggacttcaaagtagcagc

SEQ ID NO: 2302 - RNA, 19 nt, synthetic construct
  source 1..19: mol_type = other RNA
ctggacttcaaagtagcag

SEQ ID NO: 2303 - RNA, 19 nt, synthetic construct
  source 1..19: mol_type = other RNA
cctggacttcaaagtagca

SEQ ID NO: 2304 - RNA, 19 nt, synthetic construct
  source 1..19: mol_type = other RNA
tcctggacttcaaagtagc

SEQ ID NO: 2305 - RNA, 19 nt, synthetic construct
  source 1..19: mol_type = other RNA
ttcctggacttcaaagtag

SEQ ID NO: 2306 - RNA, 19 nt, synthetic construct
  source 1..19: mol_type = other RNA
tttcctggacttcaaagta

SEQ ID NO: 2307 - RNA, 19 nt, synthetic construct
  source 1..19: mol_type = other RNA
ttttcctggacttcaaagt

SEQ ID NO: 2308 - RNA, 19 nt, synthetic construct
  source 1..19: mol_type = other RNA
attttcctggacttcaaag

SEQ ID NO: 2309 - RNA, 19 nt, synthetic construct
  source 1..19: mol_type = other RNA
cattttcctggacttcaaa

SEQ ID NO: 2310 - RNA, 19 nt, synthetic construct
  source 1..19: mol_type = other RNA
acattttcctggacttcaa

SEQ ID NO: 2311 - RNA, 19 nt, synthetic construct
  source 1..19: mol_type = other RNA
aacattttcctggacttca

SEQ ID NO: 2312 - RNA, 19 nt, synthetic construct
  source 1..19: mol_type = other RNA
taacattttcctggacttc

SEQ ID NO: 2313 - RNA, 19 nt, synthetic construct
  source 1..19: mol_type = other RNA
ctaacattttcctggactt

SEQ ID NO: 2314 - RNA, 19 nt, synthetic construct
  source 1..19: mol_type = other RNA
tctaacattttcctggact

SEQ ID NO: 2315 - RNA, 19 nt, synthetic construct
  source 1..19: mol_type = other RNA
ttctaacattttcctggac

SEQ ID NO: 2316 - RNA, 19 nt, synthetic construct
  source 1..19: mol_type = other RNA
cttctaacattttcctgga

SEQ ID NO: 2317 - RNA, 19 nt, synthetic construct
  source 1..19: mol_type = other RNA
tcttctaacattttcctgg

SEQ ID NO: 2318 - RNA, 19 nt, synthetic construct
  source 1..19: mol_type = other RNA
ttcttctaacattttcctg

SEQ ID NO: 2319 - RNA, 19 nt, synthetic construct
  source 1..19: mol_type = other RNA
tttcttctaacattttcct

SEQ ID NO: 2320 - RNA, 19 nt, synthetic construct
  source 1..19: mol_type = other RNA
atttcttctaacattttcc

SEQ ID NO: 2321 - RNA, 19 nt, synthetic construct
  source 1..19: mol_type = other RNA
aatttcttctaacattttc

SEQ ID NO: 2322 - RNA, 19 nt, synthetic construct
  source 1..19: mol_type = other RNA
taatttcttctaacatttt

SEQ ID NO: 2323 - RNA, 19 nt, synthetic construct
  source 1..19: mol_type = other RNA
ataatttcttctaacattt

SEQ ID NO: 2324 - RNA, 19 nt, synthetic construct
  source 1..19: mol_type = other RNA
cataatttcttctaacatt

SEQ ID NO: 2325 - RNA, 19 nt, synthetic construct
  source 1..19: mol_type = other RNA
tcataatttcttctaacat

SEQ ID NO: 2326 - RNA, 19 nt, synthetic construct
  source 1..19: mol_type = other RNA
ttcataatttcttctaaca

SEQ ID NO: 2327 - RNA, 19 nt, synthetic construct
  source 1..19: mol_type = other RNA
tttcataatttcttctaac

SEQ ID NO: 2328 - RNA, 19 nt, synthetic construct
  source 1..19: mol_type = other RNA
atttcataatttcttctaa

SEQ ID NO: 2329 - RNA, 19 nt, synthetic construct
  source 1..19: mol_type = other RNA
tatttcataatttcttcta

SEQ ID NO: 2330 - RNA, 19 nt, synthetic construct
  source 1..19: mol_type = other RNA
atatttcataatttcttct

SEQ ID NO: 2331 - RNA, 19 nt, synthetic construct
  source 1..19: mol_type = other RNA
catatttcataatttcttc

SEQ ID NO: 2332 - RNA, 19 nt, synthetic construct
  source 1..19: mol_type = other RNA
tcatatttcataatttctt

SEQ ID NO: 2333 - RNA, 19 nt, synthetic construct
  source 1..19: mol_type = other RNA
ttcatatttcataatttct

SEQ ID NO: 2334 - RNA, 19 nt, synthetic construct
  source 1..19: mol_type = other RNA
cttcatatttcataatttc

SEQ ID NO: 2335 - RNA, 19 nt, synthetic construct
  source 1..19: mol_type = other RNA
gcttcatatttcataattt

SEQ ID NO: 2336 - RNA, 19 nt, synthetic construct
  source 1..19: mol_type = other RNA
tgcttcatatttcataatt

SEQ ID NO: 2337 - RNA, 19 nt, synthetic construct
  source 1..19: mol_type = other RNA
atgcttcatatttcataat

SEQ ID NO: 2338 - RNA, 19 nt, synthetic construct
  source 1..19: mol_type = other RNA
gatgcttcatatttcataa

SEQ ID NO: 2339 - RNA, 19 nt, synthetic construct
  source 1..19: mol_type = other RNA
cgatgcttcatatttcata

SEQ ID NO: 2340 - RNA, 19 nt, synthetic construct
  source 1..19: mol_type = other RNA
tcgatgcttcatatttcat

SEQ ID NO: 2341 - RNA, 19 nt, synthetic construct
  source 1..19: mol_type = other RNA
atcgatgcttcatatttca

SEQ ID NO: 2342 - RNA, 19 nt, synthetic construct
  source 1..19: mol_type = other RNA
aatcgatgcttcatatttc

SEQ ID NO: 2343 - RNA, 19 nt, synthetic construct
  source 1..19: mol_type = other RNA
aaatcgatgcttcatattt

SEQ ID NO: 2344 - RNA, 19 nt, synthetic construct
  source 1..19: mol_type = other RNA
aaaatcgatgcttcatatt

SEQ ID NO: 2345 - RNA, 19 nt, synthetic construct
  source 1..19: mol_type = other RNA
taaaatcgatgcttcatat

SEQ ID NO: 2346 - RNA, 19 nt, synthetic construct
  source 1..19: mol_type = other RNA
ttaaaatcgatgcttcata

SEQ ID NO: 2347 - RNA, 19 nt, synthetic construct
  source 1..19: mol_type = other RNA
gttaaaatcgatgcttcat

SEQ ID NO: 2348 - RNA, 19 nt, synthetic construct
  source 1..19: mol_type = other RNA
tgttaaaatcgatgcttca

SEQ ID NO: 2349 - RNA, 19 nt, synthetic construct
  source 1..19: mol_type = other RNA
gtgttaaaatcgatgcttc

SEQ ID NO: 2350 - RNA, 19 nt, synthetic construct
  source 1..19: mol_type = other RNA
tgtgttaaaatcgatgctt

SEQ ID NO: 2351 - RNA, 19 nt, synthetic construct
  source 1..19: mol_type = other RNA
atgtgttaaaatcgatgct

SEQ ID NO: 2352 - RNA, 19 nt, synthetic construct
  source 1..19: mol_type = other RNA
catgtgttaaaatcgatgc

SEQ ID NO: 2353 - RNA, 19 nt, synthetic construct
  source 1..19: mol_type = other RNA
tcatgtgttaaaatcgatg

SEQ ID NO: 2354 - RNA, 19 nt, synthetic construct
  source 1..19: mol_type = other RNA
gtcatgtgttaaaatcgat

SEQ ID NO: 2355 - RNA, 19 nt, synthetic construct
  source 1..19: mol_type = other RNA
agtcatgtgttaaaatcga

SEQ ID NO: 2356 - RNA, 19 nt, synthetic construct
  source 1..19: mol_type = other RNA
gagtcatgtgttaaaatcg

SEQ ID NO: 2357 - RNA, 19 nt, synthetic construct
  source 1..19: mol_type = other RNA
tgagtcatgtgttaaaatc

SEQ ID NO: 2358 - RNA, 19 nt, synthetic construct
  source 1..19: mol_type = other RNA
ttgagtcatgtgttaaaat

SEQ ID NO: 2359 - RNA, 19 nt, synthetic construct
  source 1..19: mol_type = other RNA
cttgagtcatgtgttaaaa

SEQ ID NO: 2360 - RNA, 19 nt, synthetic construct
  source 1..19: mol_type = other RNA
acttgagtcatgtgttaaa

SEQ ID NO: 2361 - RNA, 19 nt, synthetic construct
  source 1..19: mol_type = other RNA
tacttgagtcatgtgttaa

SEQ ID NO: 2362 - RNA, 19 nt, synthetic construct
  source 1..19: mol_type = other RNA
atacttgagtcatgtgtta

SEQ ID NO: 2363 - RNA, 19 nt, synthetic construct
  source 1..19: mol_type = other RNA
aatacttgagtcatgtgtt

SEQ ID NO: 2364 - RNA, 19 nt, synthetic construct
  source 1..19: mol_type = other RNA
gaatacttgagtcatgtgt

SEQ ID NO: 2365 - RNA, 19 nt, synthetic construct
  source 1..19: mol_type = other RNA
cgaatacttgagtcatgtg

SEQ ID NO: 2366 - RNA, 19 nt, synthetic construct
  source 1..19: mol_type = other RNA
tcgaatacttgagtcatgt

SEQ ID NO: 2367 - RNA, 19 nt, synthetic construct
  source 1..19: mol_type = other RNA
atcgaatacttgagtcatg

SEQ ID NO: 2368 - RNA, 19 nt, synthetic construct
  source 1..19: mol_type = other RNA
tatcgaatacttgagtcat

SEQ ID NO: 2369 - RNA, 19 nt, synthetic construct
  source 1..19: mol_type = other RNA
atatcgaatacttgagtca

SEQ ID NO: 2370 - RNA, 19 nt, synthetic construct
  source 1..19: mol_type = other RNA
aatatcgaatacttgagtc

SEQ ID NO: 2371 - RNA, 19 nt, synthetic construct
  source 1..19: mol_type = other RNA
aaatatcgaatacttgagt

SEQ ID NO: 2372 - RNA, 19 nt, synthetic construct
  source 1..19: mol_type = other RNA
caaatatcgaatacttgag

SEQ ID NO: 2373 - RNA, 19 nt, synthetic construct
  source 1..19: mol_type = other RNA
gcaaatatcgaatacttga

SEQ ID NO: 2374 - RNA, 19 nt, synthetic construct
  source 1..19: mol_type = other RNA
tgcaaatatcgaatacttg

SEQ ID NO: 2375 - RNA, 19 nt, synthetic construct
  source 1..19: mol_type = other RNA
ctgcaaatatcgaatactt

SEQ ID NO: 2376 - RNA, 19 nt, synthetic construct
  source 1..19: mol_type = other RNA
cctgcaaatatcgaatact

SEQ ID NO: 2377 - RNA, 19 nt, synthetic construct
  source 1..19: mol_type = other RNA
tcctgcaaatatcgaatac

SEQ ID NO: 2378 - RNA, 19 nt, synthetic construct
  source 1..19: mol_type = other RNA
ttcctgcaaatatcgaata

SEQ ID NO: 2379 - RNA, 19 nt, synthetic construct
  source 1..19: mol_type = other RNA
tttcctgcaaatatcgaat

SEQ ID NO: 2380 - RNA, 19 nt, synthetic construct
  source 1..19: mol_type = other RNA
atttcctgcaaatatcgaa

SEQ ID NO: 2381 - RNA, 19 nt, synthetic construct
  source 1..19: mol_type = other RNA
tatttcctgcaaatatcga

SEQ ID NO: 2382 - RNA, 19 nt, synthetic construct
  source 1..19: mol_type = other RNA
atatttcctgcaaatatcg

SEQ ID NO: 2383 - RNA, 19 nt, synthetic construct
  source 1..19: mol_type = other RNA
tatatttcctgcaaatatc

SEQ ID NO: 2384 - RNA, 19 nt, synthetic construct
  source 1..19: mol_type = other RNA
atatatttcctgcaaatat

SEQ ID NO: 2385 - RNA, 19 nt, synthetic construct
  source 1..19: mol_type = other RNA
tatatatttcctgcaaata

SEQ ID NO: 2386 - RNA, 19 nt, synthetic construct
  source 1..19: mol_type = other RNA
ttatatatttcctgcaaat

SEQ ID NO: 2387 - RNA, 19 nt, synthetic construct
  source 1..19: mol_type = other RNA
attatatatttcctgcaaa

SEQ ID NO: 2388 - RNA, 19 nt, synthetic construct
  source 1..19: mol_type = other RNA
aattatatatttcctgcaa

SEQ ID NO: 2389 - RNA, 19 nt, synthetic construct
  source 1..19: mol_type = other RNA
gaattatatatttcctgca

SEQ ID NO: 2390 - RNA, 19 nt, synthetic construct
  source 1..19: mol_type = other RNA
tgaattatatatttcctgc

SEQ ID NO: 2391 - RNA, 19 nt, synthetic construct
  source 1..19: mol_type = other RNA
ttgaattatatatttcctg

SEQ ID NO: 2392 - RNA, 19 nt, synthetic construct
  source 1..19: mol_type = other RNA
tttgaattatatatttcct

SEQ ID NO: 2393 - RNA, 19 nt, synthetic construct
  source 1..19: mol_type = other RNA
atttgaattatatatttcc

SEQ ID NO: 2394 - RNA, 19 nt, synthetic construct
  source 1..19: mol_type = other RNA
tatttgaattatatatttc

SEQ ID NO: 2395 - RNA, 19 nt, synthetic construct
  source 1..19: mol_type = other RNA
ttatttgaattatatattt

SEQ ID NO: 2396 - RNA, 19 nt, synthetic construct
  source 1..19: mol_type = other RNA
attatttgaattatatatt

SEQ ID NO: 2397 - RNA, 19 nt, synthetic construct
  source 1..19: mol_type = other RNA
gattatttgaattatatat

SEQ ID NO: 2398 - RNA, 19 nt, synthetic construct
  source 1..19: mol_type = other RNA
tgattatttgaattatata

SEQ ID NO: 2399 - RNA, 19 nt, synthetic construct
  source 1..19: mol_type = other RNA
ttgattatttgaattatat

SEQ ID NO: 2400 - RNA, 19 nt, synthetic construct
  source 1..19: mol_type = other RNA
tttgattatttgaattata

SEQ ID NO: 2401 - RNA, 19 nt, synthetic construct
  source 1..19: mol_type = other RNA
ttttgattatttgaattat

SEQ ID NO: 2402 - RNA, 19 nt, synthetic construct
  source 1..19: mol_type = other RNA
cttttgattatttgaatta

SEQ ID NO: 2403 - RNA, 19 nt, synthetic construct
  source 1..19: mol_type = other RNA
tcttttgattatttgaatt

SEQ ID NO: 2404 - RNA, 19 nt, synthetic construct
  source 1..19: mol_type = other RNA
atcttttgattatttgaat

SEQ ID NO: 2405 - RNA, 19 nt, synthetic construct
  source 1..19: mol_type = other RNA
aatcttttgattatttgaa

SEQ ID NO: 2406 - RNA, 19 nt, synthetic construct
  source 1..19: mol_type = other RNA
caatcttttgattatttga

SEQ ID NO: 2407 - RNA, 19 nt, synthetic construct
  source 1..19: mol_type = other RNA
acaatcttttgattatttg

SEQ ID NO: 2408 - RNA, 19 nt, synthetic construct
  source 1..19: mol_type = other RNA
aacaatcttttgattattt

SEQ ID NO: 2409 - RNA, 19 nt, synthetic construct
  source 1..19: mol_type = other RNA
taacaatcttttgattatt

SEQ ID NO: 2410 - RNA, 19 nt, synthetic construct
  source 1..19: mol_type = other RNA
ttaacaatcttttgattat

SEQ ID NO: 2411 - RNA, 19 nt, synthetic construct
  source 1..19: mol_type = other RNA
gttaacaatcttttgatta

SEQ ID NO: 2412 - RNA, 19 nt, synthetic construct
  source 1..19: mol_type = other RNA
ggttaacaatcttttgatt

SEQ ID NO: 2413 - RNA, 19 nt, synthetic construct
  source 1..19: mol_type = other RNA
aggttaacaatcttttgat

SEQ ID NO: 2414 - RNA, 19 nt, synthetic construct
  source 1..19: mol_type = other RNA
caggttaacaatcttttga

SEQ ID NO: 2415 - RNA, 19 nt, synthetic construct
  source 1..19: mol_type = other RNA
tcaggttaacaatcttttg

SEQ ID NO: 2416 - RNA, 19 nt, synthetic construct
  source 1..19: mol_type = other RNA
ttcaggttaacaatctttt

SEQ ID NO: 2417 - RNA, 19 nt, synthetic construct
  source 1..19: mol_type = other RNA
tttcaggttaacaatcttt

SEQ ID NO: 2418 - RNA, 19 nt, synthetic construct
  source 1..19: mol_type = other RNA
ctttcaggttaacaatctt

SEQ ID NO: 2419 - RNA, 19 nt, synthetic construct
  source 1..19: mol_type = other RNA
tctttcaggttaacaatct

SEQ ID NO: 2420 - RNA, 19 nt, synthetic construct
  source 1..19: mol_type = other RNA
ctctttcaggttaacaatc

SEQ ID NO: 2421 - RNA, 19 nt, synthetic construct
  source 1..19: mol_type = other RNA
tctctttcaggttaacaat

SEQ ID NO: 2422 - RNA, 19 nt, synthetic construct
  source 1..19: mol_type = other RNA
ttctctttcaggttaacaa

SEQ ID NO: 2423 - RNA, 19 nt, synthetic construct
  source 1..19: mol_type = other RNA
cttctctttcaggttaaca

SEQ ID NO: 2424 - RNA, 19 nt, synthetic construct
  source 1..19: mol_type = other RNA
ccttctctttcaggttaac

SEQ ID NO: 2425 - RNA, 19 nt, synthetic construct
  source 1..19: mol_type = other RNA
accttctctttcaggttaa

SEQ ID NO: 2426 - RNA, 19 nt, synthetic construct
  source 1..19: mol_type = other RNA
taccttctctttcaggtta

SEQ ID NO: 2427 - RNA, 19 nt, synthetic construct
  source 1..19: mol_type = other RNA
ctaccttctctttcaggtt

SEQ ID NO: 2428 - RNA, 19 nt, synthetic construct
  source 1..19: mol_type = other RNA
gctaccttctctttcaggt

SEQ ID NO: 2429 - RNA, 19 nt, synthetic construct
  source 1..19: mol_type = other RNA
ggctaccttctctttcagg

SEQ ID NO: 2430 - RNA, 19 nt, synthetic construct
  source 1..19: mol_type = other RNA
gggctaccttctctttcag

SEQ ID NO: 2431 - RNA, 19 nt, synthetic construct
  source 1..19: mol_type = other RNA
tgggctaccttctctttca

SEQ ID NO: 2432 - RNA, 19 nt, synthetic construct
  source 1..19: mol_type = other RNA
ctgggctaccttctctttc

SEQ ID NO: 2433 - RNA, 19 nt, synthetic construct
  source 1..19: mol_type = other RNA
gctgggctaccttctcttt

SEQ ID NO: 2434 - RNA, 19 nt, synthetic construct
  source 1..19: mol_type = other RNA
agctgggctaccttctctt

SEQ ID NO: 2435 - RNA, 19 nt, synthetic construct
  source 1..19: mol_type = other RNA
aagctgggctaccttctct

SEQ ID NO: 2436 - RNA, 19 nt, synthetic construct
  source 1..19: mol_type = other RNA
caagctgggctaccttctc

SEQ ID NO: 2437 - RNA, 19 nt, synthetic construct
  source 1..19: mol_type = other RNA
tcaagctgggctaccttct

SEQ ID NO: 2438 - RNA, 19 nt, synthetic construct
  source 1..19: mol_type = other RNA
ttcaagctgggctaccttc

SEQ ID NO: 2439 - RNA, 19 nt, synthetic construct
  source 1..19: mol_type = other RNA
cttcaagctgggctacctt

SEQ ID NO: 2440 - RNA, 19 nt, synthetic construct
  source 1..19: mol_type = other RNA
gcttcaagctgggctacct

SEQ ID NO: 2441 - RNA, 19 nt, synthetic construct
  source 1..19: mol_type = other RNA
tgcttcaagctgggctacc

SEQ ID NO: 2442 - RNA, 19 nt, synthetic construct
  source 1..19: mol_type = other RNA
gtgcttcaagctgggctac

SEQ ID NO: 2443 - RNA, 19 nt, synthetic construct
  source 1..19: mol_type = other RNA
tgtgcttcaagctgggcta

SEQ ID NO: 2444 - RNA, 19 nt, synthetic construct
  source 1..19: mol_type = other RNA
ctgtgcttcaagctgggct

SEQ ID NO: 2445 - RNA, 19 nt, synthetic construct
  source 1..19: mol_type = other RNA
actgtgcttcaagctgggc

SEQ ID NO: 2446 - RNA, 19 nt, synthetic construct
  source 1..19: mol_type = other RNA
cactgtgcttcaagctggg

SEQ ID NO: 2447 - RNA, 19 nt, synthetic construct
  source 1..19: mol_type = other RNA
gcactgtgcttcaagctgg

SEQ ID NO: 2448 - RNA, 19 nt, synthetic construct
  source 1..19: mol_type = other RNA
ggcactgtgcttcaagctg

SEQ ID NO: 2449 - RNA, 19 nt, synthetic construct
  source 1..19: mol_type = other RNA
tggcactgtgcttcaagct

SEQ ID NO: 2450 - RNA, 19 nt, synthetic construct
  source 1..19: mol_type = other RNA
ctggcactgtgcttcaagc

SEQ ID NO: 2451 - RNA, 19 nt, synthetic construct
  source 1..19: mol_type = other RNA
cctggcactgtgcttcaag

SEQ ID NO: 2452 - RNA, 19 nt, synthetic construct
  source 1..19: mol_type = other RNA
tcctggcactgtgcttcaa

SEQ ID NO: 2453 - RNA, 19 nt, synthetic construct
  source 1..19: mol_type = other RNA
ttcctggcactgtgcttca

SEQ ID NO: 2454 - RNA, 19 nt, synthetic construct
  source 1..19: mol_type = other RNA
gttcctggcactgtgcttc

SEQ ID NO: 2455 - RNA, 19 nt, synthetic construct
  source 1..19: mol_type = other RNA
ggttcctggcactgtgctt

SEQ ID NO: 2456 - RNA, 19 nt, synthetic construct
  source 1..19: mol_type = other RNA
aggttcctggcactgtgct

SEQ ID NO: 2457 - RNA, 19 nt, synthetic construct
  source 1..19: mol_type = other RNA
aaggttcctggcactgtgc

SEQ ID NO: 2458 - RNA, 19 nt, synthetic construct
  source 1..19: mol_type = other RNA
caaggttcctggcactgtg

SEQ ID NO: 2459 - RNA, 19 nt, synthetic construct
  source 1..19: mol_type = other RNA
gcaaggttcctggcactgt

SEQ ID NO: 2460 - RNA, 19 nt, synthetic construct
  source 1..19: mol_type = other RNA
tgcaaggttcctggcactg

SEQ ID NO: 2461 - RNA, 19 nt, synthetic construct
  source 1..19: mol_type = other RNA
ttgcaaggttcctggcact

SEQ ID NO: 2462 - RNA, 19 nt, synthetic construct
  source 1..19: mol_type = other RNA
tttgcaaggttcctggcac

SEQ ID NO: 2463 - RNA, 19 nt, synthetic construct
  source 1..19: mol_type = other RNA
ctttgcaaggttcctggca

SEQ ID NO: 2464 - RNA, 19 nt, synthetic construct
  source 1..19: mol_type = other RNA
tctttgcaaggttcctggc

SEQ ID NO: 2465 - RNA, 19 nt, synthetic construct
  source 1..19: mol_type = other RNA
gtctttgcaaggttcctgg

SEQ ID NO: 2466 - RNA, 19 nt, synthetic construct
  source 1..19: mol_type = other RNA
tgtctttgcaaggttcctg

SEQ ID NO: 2467 - RNA, 19 nt, synthetic construct
  source 1..19: mol_type = other RNA
gtgtctttgcaaggttcct

SEQ ID NO: 2468 - RNA, 19 nt, synthetic construct
  source 1..19: mol_type = other RNA
cgtgtctttgcaaggttcc

SEQ ID NO: 2469 - RNA, 19 nt, synthetic construct
  source 1..19: mol_type = other RNA
ccgtgtctttgcaaggttc

SEQ ID NO: 2470 - RNA, 19 nt, synthetic construct
  source 1..19: mol_type = other RNA
accgtgtctttgcaaggtt

SEQ ID NO: 2471 - RNA, 19 nt, synthetic construct
  source 1..19: mol_type = other RNA
caccgtgtctttgcaaggt

SEQ ID NO: 2472 - RNA, 19 nt, synthetic construct
  source 1..19: mol_type = other RNA
gcaccgtgtctttgcaagg

SEQ ID NO: 2473 - RNA, 19 nt, synthetic construct
  source 1..19: mol_type = other RNA
tgcaccgtgtctttgcaag

SEQ ID NO: 2474 - RNA, 19 nt, synthetic construct
  source 1..19: mol_type = other RNA
ttgcaccgtgtctttgcaa

SEQ ID NO: 2475 - RNA, 19 nt, synthetic construct
  source 1..19: mol_type = other RNA
tttgcaccgtgtctttgca

SEQ ID NO: 2476 - RNA, 19 nt, synthetic construct
  source 1..19: mol_type = other RNA
atttgcaccgtgtctttgc

SEQ ID NO: 2477 - RNA, 19 nt, synthetic construct
  source 1..19: mol_type = other RNA
gatttgcaccgtgtctttg

SEQ ID NO: 2478 - RNA, 19 nt, synthetic construct
  source 1..19: mol_type = other RNA
ggatttgcaccgtgtcttt

SEQ ID NO: 2479 - RNA, 19 nt, synthetic construct
  source 1..19: mol_type = other RNA
tggatttgcaccgtgtctt

SEQ ID NO: 2480 - RNA, 19 nt, synthetic construct
  source 1..19: mol_type = other RNA
atggatttgcaccgtgtct

SEQ ID NO: 2481 - RNA, 19 nt, synthetic construct
  source 1..19: mol_type = other RNA
catggatttgcaccgtgtc

SEQ ID NO: 2482 - RNA, 19 nt, synthetic construct
  source 1..19: mol_type = other RNA
tcatggatttgcaccgtgt

SEQ ID NO: 2483 - RNA, 19 nt, synthetic construct
  source 1..19: mol_type = other RNA
atcatggatttgcaccgtg

SEQ ID NO: 2484 - RNA, 19 nt, synthetic construct
  source 1..19: mol_type = other RNA
tatcatggatttgcaccgt

SEQ ID NO: 2485 - RNA, 19 nt, synthetic construct
  source 1..19: mol_type = other RNA
atatcatggatttgcaccg

SEQ ID NO: 2486 - RNA, 19 nt, synthetic construct
  source 1..19: mol_type = other RNA
gatatcatggatttgcacc

SEQ ID NO: 2487 - RNA, 19 nt, synthetic construct
  source 1..19: mol_type = other RNA
tgatatcatggatttgcac

SEQ ID NO: 2488 - RNA, 19 nt, synthetic construct
  source 1..19: mol_type = other RNA
gtgatatcatggatttgca

SEQ ID NO: 2489 - RNA, 19 nt, synthetic construct
  source 1..19: mol_type = other RNA
agtgatatcatggatttgc

SEQ ID NO: 2490 - RNA, 19 nt, synthetic construct
  source 1..19: mol_type = other RNA
cagtgatatcatggatttg

SEQ ID NO: 2491 - RNA, 19 nt, synthetic construct
  source 1..19: mol_type = other RNA
ccagtgatatcatggattt

SEQ ID NO: 2492 - RNA, 19 nt, synthetic construct
  source 1..19: mol_type = other RNA
cccagtgatatcatggatt

SEQ ID NO: 2493 - RNA, 19 nt, synthetic construct
  source 1..19: mol_type = other RNA
tcccagtgatatcatggat

SEQ ID NO: 2494 - RNA, 19 nt, synthetic construct
  source 1..19: mol_type = other RNA
ttcccagtgatatcatgga

SEQ ID NO: 2495 - RNA, 19 nt, synthetic construct
  source 1..19: mol_type = other RNA
tttcccagtgatatcatgg

SEQ ID NO: 2496 - RNA, 19 nt, synthetic construct
  source 1..19: mol_type = other RNA
ctttcccagtgatatcatg

SEQ ID NO: 2497 - RNA, 19 nt, synthetic construct
  source 1..19: mol_type = other RNA
tctttcccagtgatatcat

SEQ ID NO: 2498 - RNA, 19 nt, synthetic construct
  source 1..19: mol_type = other RNA
atctttcccagtgatatca

SEQ ID NO: 2499 - RNA, 19 nt, synthetic construct
  source 1..19: mol_type = other RNA
aatctttcccagtgatatc

SEQ ID NO: 2500 - RNA, 19 nt, synthetic construct
  source 1..19: mol_type = other RNA
caatctttcccagtgatat

SEQ ID NO: 2501 - RNA, 19 nt, synthetic construct
  source 1..19: mol_type = other RNA
acaatctttcccagtgata

SEQ ID NO: 2502 - RNA, 19 nt, synthetic construct
  source 1..19: mol_type = other RNA
gacaatctttcccagtgat

SEQ ID NO: 2503 - RNA, 19 nt, synthetic construct
  source 1..19: mol_type = other RNA
tgacaatctttcccagtga

SEQ ID NO: 2504 - RNA, 19 nt, synthetic construct
  source 1..19: mol_type = other RNA
ttgacaatctttcccagtg

SEQ ID NO: 2505 - RNA, 19 nt, synthetic construct
  source 1..19: mol_type = other RNA
cttgacaatctttcccagt

SEQ ID NO: 2506 - RNA, 19 nt, synthetic construct
  source 1..19: mol_type = other RNA
tcttgacaatctttcccag

SEQ ID NO: 2507 - RNA, 19 nt, synthetic construct
  source 1..19: mol_type = other RNA
gtcttgacaatctttccca

SEQ ID NO: 2508 - RNA, 19 nt, synthetic construct
  source 1..19: mol_type = other RNA
tgtcttgacaatctttccc

SEQ ID NO: 2509 - RNA, 19 nt, synthetic construct
  source 1..19: mol_type = other RNA
atgtcttgacaatctttcc

SEQ ID NO: 2510 - RNA, 19 nt, synthetic construct
  source 1..19: mol_type = other RNA
aatgtcttgacaatctttc

SEQ ID NO: 2511 - RNA, 19 nt, synthetic construct
  source 1..19: mol_type = other RNA
caatgtcttgacaatcttt

SEQ ID NO: 2512 - RNA, 19 nt, synthetic construct
  source 1..19: mol_type = other RNA
gcaatgtcttgacaatctt

SEQ ID NO: 2513 - RNA, 19 nt, synthetic construct
  source 1..19: mol_type = other RNA
ggcaatgtcttgacaatct

SEQ ID NO: 2514 - RNA, 19 nt, synthetic construct
  source 1..19: mol_type = other RNA
tggcaatgtcttgacaatc

SEQ ID NO: 2515 - RNA, 19 nt, synthetic construct
  source 1..19: mol_type = other RNA
ttggcaatgtcttgacaat

SEQ ID NO: 2516 - RNA, 19 nt, synthetic construct
  source 1..19: mol_type = other RNA
attggcaatgtcttgacaa

SEQ ID NO: 2517 - RNA, 19 nt, synthetic construct
  source 1..19: mol_type = other RNA
tattggcaatgtcttgaca

SEQ ID NO: 2518 - RNA, 19 nt, synthetic construct
  source 1..19: mol_type = other RNA
ttattggcaatgtcttgac

SEQ ID NO: 2519 - RNA, 19 nt, synthetic construct
  source 1..19: mol_type = other RNA
cttattggcaatgtcttga

SEQ ID NO: 2520 - RNA, 19 nt, synthetic construct
  source 1..19: mol_type = other RNA
ccttattggcaatgtcttg

SEQ ID NO: 2521 - RNA, 19 nt, synthetic construct
  source 1..19: mol_type = other RNA
cccttattggcaatgtctt

SEQ ID NO: 2522 - RNA, 19 nt, synthetic construct
  source 1..19: mol_type = other RNA
tcccttattggcaatgtct

SEQ ID NO: 2523 - RNA, 19 nt, synthetic construct
  source 1..19: mol_type = other RNA
ctcccttattggcaatgtc

SEQ ID NO: 2524 - RNA, 19 nt, synthetic construct
  source 1..19: mol_type = other RNA
gctcccttattggcaatgt

SEQ ID NO: 2525 - RNA, 19 nt, synthetic construct
  source 1..19: mol_type = other RNA
agctcccttattggcaatg

SEQ ID NO: 2526 - RNA, 19 nt, synthetic construct
  source 1..19: mol_type = other RNA
tagctcccttattggcaat

SEQ ID NO: 2527 - RNA, 19 nt, synthetic construct
  source 1..19: mol_type = other RNA
ttagctcccttattggcaa

SEQ ID NO: 2528 - RNA, 19 nt, synthetic construct
  source 1..19: mol_type = other RNA
tttagctcccttattggca

SEQ ID NO: 2529 - RNA, 19 nt, synthetic construct
  source 1..19: mol_type = other RNA
gtttagctcccttattggc

SEQ ID NO: 2530 - RNA, 19 nt, synthetic construct
  source 1..19: mol_type = other RNA
tgtttagctcccttattgg

SEQ ID NO: 2531 - RNA, 19 nt, synthetic construct
  source 1..19: mol_type = other RNA
ctgtttagctcccttattg

SEQ ID NO: 2532 - RNA, 19 nt, synthetic construct
  source 1..19: mol_type = other RNA
tctgtttagctcccttatt

SEQ ID NO: 2533 - RNA, 19 nt, synthetic construct
  source 1..19: mol_type = other RNA
ctctgtttagctcccttat

SEQ ID NO: 2534 - RNA, 19 nt, synthetic construct
  source 1..19: mol_type = other RNA
gctctgtttagctccctta

SEQ ID NO: 2535 - RNA, 19 nt, synthetic construct
  source 1..19: mol_type = other RNA
cgctctgtttagctccctt

SEQ ID NO: 2536 - RNA, 19 nt, synthetic construct
  source 1..19: mol_type = other RNA
ccgctctgtttagctccct

SEQ ID NO: 2537 - RNA, 19 nt, synthetic construct
  source 1..19: mol_type = other RNA
cccgctctgtttagctccc

SEQ ID NO: 2538 - RNA, 19 nt, synthetic construct
  source 1..19: mol_type = other RNA
gcccgctctgtttagctcc

SEQ ID NO: 2539 - RNA, 19 nt, synthetic construct
  source 1..19: mol_type = other RNA
agcccgctctgtttagctc

SEQ ID NO: 2540 - RNA, 19 nt, synthetic construct
  source 1..19: mol_type = other RNA
aagcccgctctgtttagct

SEQ ID NO: 2541 - RNA, 19 nt, synthetic construct
  source 1..19: mol_type = other RNA
aaagcccgctctgtttagc

SEQ ID NO: 2542 - RNA, 19 nt, synthetic construct
  source 1..19: mol_type = other RNA
taaagcccgctctgtttag

SEQ ID NO: 2543 - RNA, 19 nt, synthetic construct
  source 1..19: mol_type = other RNA
gtaaagcccgctctgttta

SEQ ID NO: 2544 - RNA, 19 nt, synthetic construct
  source 1..19: mol_type = other RNA
agtaaagcccgctctgttt

SEQ ID NO: 2545 - RNA, 19 nt, synthetic construct
  source 1..19: mol_type = other RNA
aagtaaagcccgctctgtt

SEQ ID NO: 2546 - RNA, 19 nt, synthetic construct
  source 1..19: mol_type = other RNA
aaagtaaagcccgctctgt

SEQ ID NO: 2547 - RNA, 19 nt, synthetic construct
  source 1..19: mol_type = other RNA
taaagtaaagcccgctctg

SEQ ID NO: 2548 - RNA, 19 nt, synthetic construct
  source 1..19: mol_type = other RNA
ataaagtaaagcccgctct

SEQ ID NO: 2549 - RNA, 19 nt, synthetic construct
  source 1..19: mol_type = other RNA
aataaagtaaagcccgctc

SEQ ID NO: 2550 - RNA, 19 nt, synthetic construct
  source 1..19: mol_type = other RNA
taataaagtaaagcccgct

SEQ ID NO: 2551 - RNA, 19 nt, synthetic construct
  source 1..19: mol_type = other RNA
ttaataaagtaaagcccgc

SEQ ID NO: 2552 - RNA, 19 nt, synthetic construct
  source 1..19: mol_type = other RNA
tttaataaagtaaagcccg

SEQ ID NO: 2553 - RNA, 19 nt, synthetic construct
  source 1..19: mol_type = other RNA
gtttaataaagtaaagccc

SEQ ID NO: 2554 - RNA, 19 nt, synthetic construct
  source 1..19: mol_type = other RNA
ggtttaataaagtaaagcc

SEQ ID NO: 2555 - RNA, 19 nt, synthetic construct
  source 1..19: mol_type = other RNA
aggtttaataaagtaaagc

SEQ ID NO: 2556 - RNA, 19 nt, synthetic construct
  source 1..19: mol_type = other RNA
gaggtttaataaagtaaag

SEQ ID NO: 2557 - RNA, 19 nt, synthetic construct
  source 1..19: mol_type = other RNA
agaggtttaataaagtaaa

SEQ ID NO: 2558 - RNA, 19 nt, synthetic construct
  source 1..19: mol_type = other RNA
cagaggtttaataaagtaa

SEQ ID NO: 2559 - RNA, 19 nt, synthetic construct
  source 1..19: mol_type = other RNA
tcagaggtttaataaagta

SEQ ID NO: 2560 - RNA, 19 nt, synthetic construct
  source 1..19: mol_type = other RNA
ttcagaggtttaataaagt

SEQ ID NO: 2561 - RNA, 19 nt, synthetic construct
  source 1..19: mol_type = other RNA
tttcagaggtttaataaag

SEQ ID NO: 2562 - RNA, 19 nt, synthetic construct
  source 1..19: mol_type = other RNA
ctttcagaggtttaataaa

SEQ ID NO: 2563 - RNA, 19 nt, synthetic construct
  source 1..19: mol_type = other RNA
gctttcagaggtttaataa

SEQ ID NO: 2564 - RNA, 19 nt, synthetic construct
  source 1..19: mol_type = other RNA
agctttcagaggtttaata

SEQ ID NO: 2565 - RNA, 19 nt, synthetic construct
  source 1..19: mol_type = other RNA
tagctttcagaggtttaat

SEQ ID NO: 2566 - RNA, 19 nt, synthetic construct
  source 1..19: mol_type = other RNA
ttagctttcagaggtttaa

SEQ ID NO: 2567 - RNA, 19 nt, synthetic construct
  source 1..19: mol_type = other RNA
gttagctttcagaggttta

SEQ ID NO: 2568 - RNA, 19 nt, synthetic construct
  source 1..19: mol_type = other RNA
ggttagctttcagaggttt

SEQ ID NO: 2569 - RNA, 19 nt, synthetic construct
  source 1..19: mol_type = other RNA
tggttagctttcagaggtt

SEQ ID NO: 2570 - RNA, 19 nt, synthetic construct
  source 1..19: mol_type = other RNA
ctggttagctttcagaggt

SEQ ID NO: 2571 - RNA, 19 nt, synthetic construct
  source 1..19: mol_type = other RNA
gctggttagctttcagagg

SEQ ID NO: 2572 - RNA, 19 nt, synthetic construct
  source 1..19: mol_type = other RNA
tgctggttagctttcagag

SEQ ID NO: 2573 - RNA, 19 nt, synthetic construct
  source 1..19: mol_type = other RNA
ttgctggttagctttcaga

SEQ ID NO: 2574 - RNA, 19 nt, synthetic construct
  source 1..19: mol_type = other RNA
attgctggttagctttcag

SEQ ID NO: 2575 - RNA, 19 nt, synthetic construct
  source 1..19: mol_type = other RNA
aattgctggttagctttca

SEQ ID NO: 2576 - RNA, 19 nt, synthetic construct
  source 1..19: mol_type = other RNA
gaattgctggttagctttc

SEQ ID NO: 2577 - RNA, 19 nt, synthetic construct
  source 1..19: mol_type = other RNA
agaattgctggttagcttt

SEQ ID NO: 2578 - RNA, 19 nt, synthetic construct
  source 1..19: mol_type = other RNA
aagaattgctggttagctt

SEQ ID NO: 2579 - RNA, 19 nt, synthetic construct
  source 1..19: mol_type = other RNA
taagaattgctggttagct

SEQ ID NO: 2580 - RNA, 19 nt, synthetic construct
  source 1..19: mol_type = other RNA
ctaagaattgctggttagc

SEQ ID NO: 2581 - RNA, 19 nt, synthetic construct
  source 1..19: mol_type = other RNA
actaagaattgctggttag

SEQ ID NO: 2582 - RNA, 19 nt, synthetic construct
  source 1..19: mol_type = other RNA
gactaagaattgctggtta

SEQ ID NO: 2583 - RNA, 19 nt, synthetic construct
  source 1..19: mol_type = other RNA
agactaagaattgctggtt

SEQ ID NO: 2584 - RNA, 19 nt, synthetic construct
  source 1..19: mol_type = other RNA
tagactaagaattgctggt

SEQ ID NO: 2585 - RNA, 19 nt, synthetic construct
  source 1..19: mol_type = other RNA
gtagactaagaattgctgg

SEQ ID NO: 2586 - RNA, 19 nt, synthetic construct
  source 1..19: mol_type = other RNA
agtagactaagaattgctg

SEQ ID NO: 2587 - RNA, 19 nt, synthetic construct
  source 1..19: mol_type = other RNA
cagtagactaagaattgct

SEQ ID NO: 2588 - RNA, 19 nt, synthetic construct
  source 1..19: mol_type = other RNA
acagtagactaagaattgc

SEQ ID NO: 2589 - RNA, 19 nt, synthetic construct
  source 1..19: mol_type = other RNA
cacagtagactaagaattg

SEQ ID NO: 2590 - RNA, 19 nt, synthetic construct
  source 1..19: mol_type = other RNA
tcacagtagactaagaatt

SEQ ID NO: 2591 - RNA, 19 nt, synthetic construct
  source 1..19: mol_type = other RNA
ttcacagtagactaagaat

SEQ ID NO: 2592 - RNA, 19 nt, synthetic construct
  source 1..19: mol_type = other RNA
tttcacagtagactaagaa

SEQ ID NO: 2593 - RNA, 19 nt, synthetic construct
  source 1..19: mol_type = other RNA
atttcacagtagactaaga

SEQ ID NO: 2594 - RNA, 19 nt, synthetic construct
  source 1..19: mol_type = other RNA
gatttcacagtagactaag

SEQ ID NO: 2595 - RNA, 19 nt, synthetic construct
  source 1..19: mol_type = other RNA
cgatttcacagtagactaa

SEQ ID NO: 2596 - RNA, 19 nt, synthetic construct
  source 1..19: mol_type = other RNA
tcgatttcacagtagacta

SEQ ID NO: 2597 - RNA, 19 nt, synthetic construct
  source 1..19: mol_type = other RNA
atcgatttcacagtagact

SEQ ID NO: 2598 - RNA, 19 nt, synthetic construct
  source 1..19: mol_type = other RNA
catcgatttcacagtagac

SEQ ID NO: 2599 - RNA, 19 nt, synthetic construct
  source 1..19: mol_type = other RNA
ccatcgatttcacagtaga

SEQ ID NO: 2600 - RNA, 19 nt, synthetic construct
  source 1..19: mol_type = other RNA
cccatcgatttcacagtag

SEQ ID NO: 2601 - RNA, 19 nt, synthetic construct
  source 1..19: mol_type = other RNA
acccatcgatttcacagta

SEQ ID NO: 2602 - RNA, 19 nt, synthetic construct
  source 1..19: mol_type = other RNA
gacccatcgatttcacagt

SEQ ID NO: 2603 - RNA, 19 nt, synthetic construct
  source 1..19: mol_type = other RNA
agacccatcgatttcacag

SEQ ID NO: 2604 - RNA, 19 nt, synthetic construct
  source 1..19: mol_type = other RNA
cagacccatcgatttcaca

SEQ ID NO: 2605 - RNA, 19 nt, synthetic construct
  source 1..19: mol_type = other RNA
ccagacccatcgatttcac

SEQ ID NO: 2606 - RNA, 19 nt, synthetic construct
  source 1..19: mol_type = other RNA
tccagacccatcgatttca

SEQ ID NO: 2607 - RNA, 19 nt, synthetic construct
  source 1..19: mol_type = other RNA
ttccagacccatcgatttc

SEQ ID NO: 2608 - RNA, 19 nt, synthetic construct
  source 1..19: mol_type = other RNA
tttccagacccatcgattt

SEQ ID NO: 2609 - RNA, 19 nt, synthetic construct
  source 1..19: mol_type = other RNA
atttccagacccatcgatt

SEQ ID NO: 2610 - RNA, 19 nt, synthetic construct
  source 1..19: mol_type = other RNA
catttccagacccatcgat

SEQ ID NO: 2611 - RNA, 19 nt, synthetic construct
  source 1..19: mol_type = other RNA
ccatttccagacccatcga

SEQ ID NO: 2612 - RNA, 19 nt, synthetic construct
  source 1..19: mol_type = other RNA
tccatttccagacccatcg

SEQ ID NO: 2613 - RNA, 19 nt, synthetic construct
  source 1..19: mol_type = other RNA
atccatttccagacccatc

SEQ ID NO: 2614 - RNA, 19 nt, synthetic construct
  source 1..19: mol_type = other RNA
catccatttccagacccat

SEQ ID NO: 2615 - RNA, 19 nt, synthetic construct
  source 1..19: mol_type = other RNA
ccatccatttccagaccca

SEQ ID NO: 2616 - RNA, 19 nt, synthetic construct
  source 1..19: mol_type = other RNA
tccatccatttccagaccc

SEQ ID NO: 2617 - RNA, 19 nt, synthetic construct
  source 1..19: mol_type = other RNA
gtccatccatttccagacc

SEQ ID NO: 2618 - RNA, 19 nt, synthetic construct
  source 1..19: mol_type = other RNA
agtccatccatttccagac

SEQ ID NO: 2619 - RNA, 19 nt, synthetic construct
  source 1..19: mol_type = other RNA
cagtccatccatttccaga

SEQ ID NO: 2620 - RNA, 19 nt, synthetic construct
  source 1..19: mol_type = other RNA
acagtccatccatttccag

SEQ ID NO: 2621 - RNA, 19 nt, synthetic construct
  source 1..19: mol_type = other RNA
cacagtccatccatttcca

SEQ ID NO: 2622 - RNA, 19 nt, synthetic construct
  source 1..19: mol_type = other RNA
acacagtccatccatttcc

SEQ ID NO: 2623 - RNA, 19 nt, synthetic construct
  source 1..19: mol_type = other RNA
aacacagtccatccatttc

SEQ ID NO: 2624 - RNA, 19 nt, synthetic construct
  source 1..19: mol_type = other RNA
aaacacagtccatccattt

SEQ ID NO: 2625 - RNA, 19 nt, synthetic construct
  source 1..19: mol_type = other RNA
gaaacacagtccatccatt

SEQ ID NO: 2626 - RNA, 19 nt, synthetic construct
  source 1..19: mol_type = other RNA
tgaaacacagtccatccat

SEQ ID NO: 2627 - RNA, 19 nt, synthetic construct
  source 1..19: mol_type = other RNA
ctgaaacacagtccatcca

SEQ ID NO: 2628 - RNA, 19 nt, synthetic construct
  source 1..19: mol_type = other RNA
tctgaaacacagtccatcc

SEQ ID NO: 2629 - RNA, 19 nt, synthetic construct
  source 1..19: mol_type = other RNA
ttctgaaacacagtccatc

SEQ ID NO: 2630 - RNA, 19 nt, synthetic construct
  source 1..19: mol_type = other RNA
cttctgaaacacagtccat

SEQ ID NO: 2631 - RNA, 19 nt, synthetic construct
  source 1..19: mol_type = other RNA
tcttctgaaacacagtcca

SEQ ID NO: 2632 - RNA, 19 nt, synthetic construct
  source 1..19: mol_type = other RNA
ctcttctgaaacacagtcc

SEQ ID NO: 2633 - RNA, 19 nt, synthetic construct
  source 1..19: mol_type = other RNA
tctcttctgaaacacagtc

SEQ ID NO: 2634 - RNA, 19 nt, synthetic construct
  source 1..19: mol_type = other RNA
gtctcttctgaaacacagt

SEQ ID NO: 2635 - RNA, 19 nt, synthetic construct
  source 1..19: mol_type = other RNA
agtctcttctgaaacacag

SEQ ID NO: 2636 - RNA, 19 nt, synthetic construct
  source 1..19: mol_type = other RNA
aagtctcttctgaaacaca

SEQ ID NO: 2637 - RNA, 19 nt, synthetic construct
  source 1..19: mol_type = other RNA
caagtctcttctgaaacac

SEQ ID NO: 2638 - RNA, 19 nt, synthetic construct
  source 1..19: mol_type = other RNA
tcaagtctcttctgaaaca

SEQ ID NO: 2639 - RNA, 19 nt, synthetic construct
  source 1..19: mol_type = other RNA
atcaagtctcttctgaaac

SEQ ID NO: 2640 - RNA, 19 nt, synthetic construct
  source 1..19: mol_type = other RNA
catcaagtctcttctgaaa

SEQ ID NO: 2641 - RNA, 19 nt, synthetic construct
  source 1..19: mol_type = other RNA
ccatcaagtctcttctgaa

SEQ ID NO: 2642 - RNA, 19 nt, synthetic construct
  source 1..19: mol_type = other RNA
gccatcaagtctcttctga

SEQ ID NO: 2643 - RNA, 19 nt, synthetic construct
  source 1..19: mol_type = other RNA
tgccatcaagtctcttctg

SEQ ID NO: 2644 - RNA, 19 nt, synthetic construct
  source 1..19: mol_type = other RNA
ctgccatcaagtctcttct

SEQ ID NO: 2645 - RNA, 19 nt, synthetic construct
  source 1..19: mol_type = other RNA
actgccatcaagtctcttc

SEQ ID NO: 2646 - RNA, 19 nt, synthetic construct
  source 1..19: mol_type = other RNA
cactgccatcaagtctctt

SEQ ID NO: 2647 - RNA, 19 nt, synthetic construct
  source 1..19: mol_type = other RNA
acactgccatcaagtctct

SEQ ID NO: 2648 - RNA, 19 nt, synthetic construct
  source 1..19: mol_type = other RNA
tacactgccatcaagtctc

SEQ ID NO: 2649 - RNA, 19 nt, synthetic construct
  source 1..19: mol_type = other RNA
ctacactgccatcaagtct

SEQ ID NO: 2650 - RNA, 19 nt, synthetic construct
  source 1..19: mol_type = other RNA
tctacactgccatcaagtc

SEQ ID NO: 2651 - RNA, 19 nt, synthetic construct
  source 1..19: mol_type = other RNA
atctacactgccatcaagt

SEQ ID NO: 2652 - RNA, 19 nt, synthetic construct
  source 1..19: mol_type = other RNA
aatctacactgccatcaag

SEQ ID NO: 2653 - RNA, 19 nt, synthetic construct
  source 1..19: mol_type = other RNA
aaatctacactgccatcaa

SEQ ID NO: 2654 - RNA, 19 nt, synthetic construct
  source 1..19: mol_type = other RNA
gaaatctacactgccatca

SEQ ID NO: 2655 - RNA, 19 nt, synthetic construct
  source 1..19: mol_type = other RNA
tgaaatctacactgccatc

SEQ ID NO: 2656 - RNA, 19 nt, synthetic construct
  source 1..19: mol_type = other RNA
ttgaaatctacactgccat

SEQ ID NO: 2657 - RNA, 19 nt, synthetic construct
  source 1..19: mol_type = other RNA
cttgaaatctacactgcca

SEQ ID NO: 2658 - RNA, 19 nt, synthetic construct
  source 1..19: mol_type = other RNA
tcttgaaatctacactgcc

SEQ ID NO: 2659 - RNA, 19 nt, synthetic construct
  source 1..19: mol_type = other RNA
ttcttgaaatctacactgc

SEQ ID NO: 2660 - RNA, 19 nt, synthetic construct
  source 1..19: mol_type = other RNA
tttcttgaaatctacactg

SEQ ID NO: 2661 - RNA, 19 nt, synthetic construct
  source 1..19: mol_type = other RNA
ttttcttgaaatctacact

SEQ ID NO: 2662 - RNA, 19 nt, synthetic construct
  source 1..19: mol_type = other RNA
tttttcttgaaatctacac

SEQ ID NO: 2663 - RNA, 19 nt, synthetic construct
  source 1..19: mol_type = other RNA
gtttttcttgaaatctaca

SEQ ID NO: 2664 - RNA, 19 nt, synthetic construct
  source 1..19: mol_type = other RNA
agtttttcttgaaatctac

SEQ ID NO: 2665 - RNA, 19 nt, synthetic construct
  source 1..19: mol_type = other RNA
cagtttttcttgaaatcta

SEQ ID NO: 2666 - RNA, 19 nt, synthetic construct
  source 1..19: mol_type = other RNA
ccagtttttcttgaaatct

SEQ ID NO: 2667 - RNA, 19 nt, synthetic construct
  source 1..19: mol_type = other RNA
tccagtttttcttgaaatc

SEQ ID NO: 2668 - RNA, 19 nt, synthetic construct
  source 1..19: mol_type = other RNA
atccagtttttcttgaaat

SEQ ID NO: 2669 - RNA, 19 nt, synthetic construct
  source 1..19: mol_type = other RNA
aatccagtttttcttgaaa

SEQ ID NO: 2670 - RNA, 19 nt, synthetic construct
  source 1..19: mol_type = other RNA
gaatccagtttttcttgaa

SEQ ID NO: 2671 - RNA, 19 nt, synthetic construct
  source 1..19: mol_type = other RNA
tgaatccagtttttcttga

SEQ ID NO: 2672 - RNA, 19 nt, synthetic construct
  source 1..19: mol_type = other RNA
ttgaatccagtttttcttg

SEQ ID NO: 2673 - RNA, 19 nt, synthetic construct
  source 1..19: mol_type = other RNA
attgaatccagtttttctt

SEQ ID NO: 2674 - RNA, 19 nt, synthetic construct
  source 1..19: mol_type = other RNA
tattgaatccagtttttct

SEQ ID NO: 2675 - RNA, 19 nt, synthetic construct
  source 1..19: mol_type = other RNA
atattgaatccagtttttc

SEQ ID NO: 2676 - RNA, 19 nt, synthetic construct
  source 1..19: mol_type = other RNA
tatattgaatccagttttt

SEQ ID NO: 2677 - RNA, 19 nt, synthetic construct
  source 1..19: mol_type = other RNA
ttatattgaatccagtttt

SEQ ID NO: 2678 - RNA, 19 nt, synthetic construct
  source 1..19: mol_type = other RNA
tttatattgaatccagttt

SEQ ID NO: 2679 - RNA, 19 nt, synthetic construct
  source 1..19: mol_type = other RNA
ctttatattgaatccagtt

SEQ ID NO: 2680 - RNA, 19 nt, synthetic construct
  source 1..19: mol_type = other RNA
tctttatattgaatccagt

SEQ ID NO: 2681 - RNA, 19 nt, synthetic construct
  source 1..19: mol_type = other RNA
ttctttatattgaatccag

SEQ ID NO: 2682 - RNA, 19 nt, synthetic construct
  source 1..19: mol_type = other RNA
cttctttatattgaatcca

SEQ ID NO: 2683 - RNA, 19 nt, synthetic construct
  source 1..19: mol_type = other RNA
ccttctttatattgaatcc

SEQ ID NO: 2684 - RNA, 19 nt, synthetic construct
  source 1..19: mol_type = other RNA
tccttctttatattgaatc

SEQ ID NO: 2685 - RNA, 19 nt, synthetic construct
  source 1..19: mol_type = other RNA
atccttctttatattgaat

SEQ ID NO: 2686 - RNA, 19 nt, synthetic construct
  source 1..19: mol_type = other RNA
aatccttctttatattgaa

SEQ ID NO: 2687 - RNA, 19 nt, synthetic construct
  source 1..19: mol_type = other RNA
aaatccttctttatattga

SEQ ID NO: 2688 - RNA, 19 nt, synthetic construct
  source 1..19: mol_type = other RNA
caaatccttctttatattg

SEQ ID NO: 2689 - RNA, 19 nt, synthetic construct
  source 1..19: mol_type = other RNA
ccaaatccttctttatatt

SEQ ID NO: 2690 - RNA, 19 nt, synthetic construct
  source 1..19: mol_type = other RNA
tccaaatccttctttatat

SEQ ID NO: 2691 - RNA, 19 nt, synthetic construct
  source 1..19: mol_type = other RNA
gtccaaatccttctttata

SEQ ID NO: 2692 - RNA, 19 nt, synthetic construct
  source 1..19: mol_type = other RNA
tgtccaaatccttctttat

SEQ ID NO: 2693 - RNA, 19 nt, synthetic construct
  source 1..19: mol_type = other RNA
atgtccaaatccttcttta

SEQ ID NO: 2694 - RNA, 19 nt, synthetic construct
  source 1..19: mol_type = other RNA
gatgtccaaatccttcttt

SEQ ID NO: 2695 - RNA, 19 nt, synthetic construct
  source 1..19: mol_type = other RNA
agatgtccaaatccttctt

SEQ ID NO: 2696 - RNA, 19 nt, synthetic construct
  source 1..19: mol_type = other RNA
cagatgtccaaatccttct

SEQ ID NO: 2697 - RNA, 19 nt, synthetic construct
  source 1..19: mol_type = other RNA
acagatgtccaaatccttc

SEQ ID NO: 2698 - RNA, 19 nt, synthetic construct
  source 1..19: mol_type = other RNA
gacagatgtccaaatcctt

SEQ ID NO: 2699 - RNA, 19 nt, synthetic construct
  source 1..19: mol_type = other RNA
agacagatgtccaaatcct

SEQ ID NO: 2700 - RNA, 19 nt, synthetic construct
  source 1..19: mol_type = other RNA
gagacagatgtccaaatcc

SEQ ID NO: 2701 - RNA, 19 nt, synthetic construct
  source 1..19: mol_type = other RNA
ggagacagatgtccaaatc

SEQ ID NO: 2702 - RNA, 19 nt, synthetic construct
  source 1..19: mol_type = other RNA
aggagacagatgtccaaat

SEQ ID NO: 2703 - RNA, 19 nt, synthetic construct
  source 1..19: mol_type = other RNA
taggagacagatgtccaaa

SEQ ID NO: 2704 - RNA, 19 nt, synthetic construct
  source 1..19: mol_type = other RNA
gtaggagacagatgtccaa

SEQ ID NO: 2705 - RNA, 19 nt, synthetic construct
  source 1..19: mol_type = other RNA
agtaggagacagatgtcca

SEQ ID NO: 2706 - RNA, 19 nt, synthetic construct
  source 1..19: mol_type = other RNA
cagtaggagacagatgtcc

SEQ ID NO: 2707 - RNA, 19 nt, synthetic construct
  source 1..19: mol_type = other RNA
ccagtaggagacagatgtc

SEQ ID NO: 2708 - RNA, 19 nt, synthetic construct
  source 1..19: mol_type = other RNA
gccagtaggagacagatgt

SEQ ID NO: 2709 - RNA, 19 nt, synthetic construct
  source 1..19: mol_type = other RNA
tgccagtaggagacagatg

SEQ ID NO: 2710 - RNA, 19 nt, synthetic construct
  source 1..19: mol_type = other RNA
gtgccagtaggagacagat

SEQ ID NO: 2711 - RNA, 19 nt, synthetic construct
  source 1..19: mol_type = other RNA
tgtgccagtaggagacaga

SEQ ID NO: 2712 - RNA, 19 nt, synthetic construct
  source 1..19: mol_type = other RNA
ttgtgccagtaggagacag

SEQ ID NO: 2713 - RNA, 19 nt, synthetic construct
  source 1..19: mol_type = other RNA
gttgtgccagtaggagaca

SEQ ID NO: 2714 - RNA, 19 nt, synthetic construct
  source 1..19: mol_type = other RNA
tgttgtgccagtaggagac

SEQ ID NO: 2715 - RNA, 19 nt, synthetic construct
  source 1..19: mol_type = other RNA
ctgttgtgccagtaggaga

SEQ ID NO: 2716 - RNA, 19 nt, synthetic construct
  source 1..19: mol_type = other RNA
tctgttgtgccagtaggag

SEQ ID NO: 2717 - RNA, 19 nt, synthetic construct
  source 1..19: mol_type = other RNA
ttctgttgtgccagtagga

SEQ ID NO: 2718 - RNA, 19 nt, synthetic construct
  source 1..19: mol_type = other RNA
attctgttgtgccagtagg

SEQ ID NO: 2719 - RNA, 19 nt, synthetic construct
  source 1..19: mol_type = other RNA
aattctgttgtgccagtag

SEQ ID NO: 2720 - RNA, 19 nt, synthetic construct
  source 1..19: mol_type = other RNA
aaattctgttgtgccagta

SEQ ID NO: 2721 - RNA, 19 nt, synthetic construct
  source 1..19: mol_type = other RNA
aaaattctgttgtgccagt

SEQ ID NO: 2722 - RNA, 19 nt, synthetic construct
  source 1..19: mol_type = other RNA
caaaattctgttgtgccag

SEQ ID NO: 2723 - RNA, 19 nt, synthetic construct
  source 1..19: mol_type = other RNA
ccaaaattctgttgtgcca

SEQ ID NO: 2724 - RNA, 19 nt, synthetic construct
  source 1..19: mol_type = other RNA
gccaaaattctgttgtgcc

SEQ ID NO: 2725 - RNA, 19 nt, synthetic construct
  source 1..19: mol_type = other RNA
agccaaaattctgttgtgc

SEQ ID NO: 2726 - RNA, 19 nt, synthetic construct
  source 1..19: mol_type = other RNA
cagccaaaattctgttgtg

SEQ ID NO: 2727 - RNA, 19 nt, synthetic construct
  source 1..19: mol_type = other RNA
ccagccaaaattctgttgt

SEQ ID NO: 2728 - RNA, 19 nt, synthetic construct
  source 1..19: mol_type = other RNA
cccagccaaaattctgttg

SEQ ID NO: 2729 - RNA, 19 nt, synthetic construct
  source 1..19: mol_type = other RNA
tcccagccaaaattctgtt

SEQ ID NO: 2730 - RNA, 19 nt, synthetic construct
  source 1..19: mol_type = other RNA
ttcccagccaaaattctgt

SEQ ID NO: 2731 - RNA, 19 nt, synthetic construct
  source 1..19: mol_type = other RNA
tttcccagccaaaattctg

SEQ ID NO: 2732 - RNA, 19 nt, synthetic construct
  source 1..19: mol_type = other RNA
atttcccagccaaaattct

SEQ ID NO: 2733 - RNA, 19 nt, synthetic construct
  source 1..19: mol_type = other RNA
catttcccagccaaaattc

SEQ ID NO: 2734 - RNA, 19 nt, synthetic construct
  source 1..19: mol_type = other RNA
tcatttcccagccaaaatt

SEQ ID NO: 2735 - RNA, 19 nt, synthetic construct
  source 1..19: mol_type = other RNA
ctcatttcccagccaaaat

SEQ ID NO: 2736 - RNA, 19 nt, synthetic construct
  source 1..19: mol_type = other RNA
tctcatttcccagccaaaa

SEQ ID NO: 2737 - RNA, 19 nt, synthetic construct
  source 1..19: mol_type = other RNA
ttctcatttcccagccaaa

SEQ ID NO: 2738 - RNA, 19 nt, synthetic construct
  source 1..19: mol_type = other RNA
cttctcatttcccagccaa

SEQ ID NO: 2739 - RNA, 19 nt, synthetic construct
  source 1..19: mol_type = other RNA
tcttctcatttcccagcca

SEQ ID NO: 2740 - RNA, 19 nt, synthetic construct
  source 1..19: mol_type = other RNA
atcttctcatttcccagcc

SEQ ID NO: 2741 - RNA, 19 nt, synthetic construct
  source 1..19: mol_type = other RNA
aatcttctcatttcccagc

SEQ ID NO: 2742 - RNA, 19 nt, synthetic construct
  source 1..19: mol_type = other RNA
gaatcttctcatttcccag

SEQ ID NO: 2743 - RNA, 19 nt, synthetic construct
  source 1..19: mol_type = other RNA
tgaatcttctcatttccca

SEQ ID NO: 2744 - RNA, 19 nt, synthetic construct
  source 1..19: mol_type = other RNA
atgaatcttctcatttccc

SEQ ID NO: 2745 - RNA, 19 nt, synthetic construct
  source 1..19: mol_type = other RNA
aatgaatcttctcatttcc

SEQ ID NO: 2746 - RNA, 19 nt, synthetic construct
  source 1..19: mol_type = other RNA
aaatgaatcttctcatttc

SEQ ID NO: 2747 - RNA, 19 nt, synthetic construct
  source 1..19: mol_type = other RNA
caaatgaatcttctcattt

SEQ ID NO: 2748 - RNA, 19 nt, synthetic construct
  source 1..19: mol_type = other RNA
tcaaatgaatcttctcatt

SEQ ID NO: 2749 - RNA, 19 nt, synthetic construct
  source 1..19: mol_type = other RNA
atcaaatgaatcttctcat

SEQ ID NO: 2750 - RNA, 19 nt, synthetic construct
  source 1..19: mol_type = other RNA
tatcaaatgaatcttctca

SEQ ID NO: 2751 - RNA, 19 nt, synthetic construct
  source 1..19: mol_type = other RNA
ttatcaaatgaatcttctc

SEQ ID NO: 2752 - RNA, 19 nt, synthetic construct
  source 1..19: mol_type = other RNA
cttatcaaatgaatcttct

SEQ ID NO: 2753 - RNA, 19 nt, synthetic construct
  source 1..19: mol_type = other RNA
gcttatcaaatgaatcttc

SEQ ID NO: 2754 - RNA, 19 nt, synthetic construct
  source 1..19: mol_type = other RNA
tgcttatcaaatgaatctt

SEQ ID NO: 2755 - RNA, 19 nt, synthetic construct
  source 1..19: mol_type = other RNA
gtgcttatcaaatgaatct

SEQ ID NO: 2756 - RNA, 19 nt, synthetic construct
  source 1..19: mol_type = other RNA
tgtgcttatcaaatgaatc

SEQ ID NO: 2757 - RNA, 19 nt, synthetic construct
  source 1..19: mol_type = other RNA
gtgtgcttatcaaatgaat

SEQ ID NO: 2758 - RNA, 19 nt, synthetic construct
  source 1..19: mol_type = other RNA
tgtgtgcttatcaaatgaa

SEQ ID NO: 2759 - RNA, 19 nt, synthetic construct
  source 1..19: mol_type = other RNA
ctgtgtgcttatcaaatga

SEQ ID NO: 2760 - RNA, 19 nt, synthetic construct
  source 1..19: mol_type = other RNA
actgtgtgcttatcaaatg

SEQ ID NO: 2761 - RNA, 19 nt, synthetic construct
  source 1..19: mol_type = other RNA
gactgtgtgcttatcaaat

SEQ ID NO: 2762 - RNA, 19 nt, synthetic construct
  source 1..19: mol_type = other RNA
agactgtgtgcttatcaaa

SEQ ID NO: 2763 - RNA, 19 nt, synthetic construct
  source 1..19: mol_type = other RNA
cagactgtgtgcttatcaa

SEQ ID NO: 2764 - RNA, 19 nt, synthetic construct
  source 1..19: mol_type = other RNA
gcagactgtgtgcttatca

SEQ ID NO: 2765 - RNA, 19 nt, synthetic construct
  source 1..19: mol_type = other RNA
ggcagactgtgtgcttatc

SEQ ID NO: 2766 - RNA, 19 nt, synthetic construct
  source 1..19: mol_type = other RNA
tggcagactgtgtgcttat

SEQ ID NO: 2767 - RNA, 19 nt, synthetic construct
  source 1..19: mol_type = other RNA
atggcagactgtgtgctta

SEQ ID NO: 2768 - RNA, 19 nt, synthetic construct
  source 1..19: mol_type = other RNA
gatggcagactgtgtgctt

SEQ ID NO: 2769 - RNA, 19 nt, synthetic construct
  source 1..19: mol_type = other RNA
ggatggcagactgtgtgct

SEQ ID NO: 2770 - RNA, 19 nt, synthetic construct
  source 1..19: mol_type = other RNA
gggatggcagactgtgtgc

SEQ ID NO: 2771 - RNA, 19 nt, synthetic construct
  source 1..19: mol_type = other RNA
tgggatggcagactgtgtg

SEQ ID NO: 2772 - RNA, 19 nt, synthetic construct
  source 1..19: mol_type = other RNA
atgggatggcagactgtgt

SEQ ID NO: 2773 - RNA, 19 nt, synthetic construct
  source 1..19: mol_type = other RNA
tatgggatggcagactgtg

SEQ ID NO: 2774 - RNA, 19 nt, synthetic construct
  source 1..19: mol_type = other RNA
atatgggatggcagactgt

SEQ ID NO: 2775 - RNA, 19 nt, synthetic construct
  source 1..19: mol_type = other RNA
catatgggatggcagactg

SEQ ID NO: 2776 - RNA, 19 nt, synthetic construct
  source 1..19: mol_type = other RNA
gcatatgggatggcagact

SEQ ID NO: 2777 - RNA, 19 nt, synthetic construct
  source 1..19: mol_type = other RNA
tgcatatgggatggcagac

SEQ ID NO: 2778 - RNA, 19 nt, synthetic construct
  source 1..19: mol_type = other RNA
atgcatatgggatggcaga

SEQ ID NO: 2779 - RNA, 19 nt, synthetic construct
  source 1..19: mol_type = other RNA
aatgcatatgggatggcag

SEQ ID NO: 2780 - RNA, 19 nt, synthetic construct
  source 1..19: mol_type = other RNA
taatgcatatgggatggca

SEQ ID NO: 2781 - RNA, 19 nt, synthetic construct
  source 1..19: mol_type = other RNA
ttaatgcatatgggatggc

SEQ ID NO: 2782 - RNA, 19 nt, synthetic construct
  source 1..19: mol_type = other RNA
cttaatgcatatgggatgg

SEQ ID NO: 2783 - RNA, 19 nt, synthetic construct
  source 1..19: mol_type = other RNA
tcttaatgcatatgggatg

SEQ ID NO: 2784 - RNA, 19 nt, synthetic construct
  source 1..19: mol_type = other RNA
ctcttaatgcatatgggat

SEQ ID NO: 2785 - RNA, 19 nt, synthetic construct
  source 1..19: mol_type = other RNA
actcttaatgcatatggga

SEQ ID NO: 2786 - RNA, 19 nt, synthetic construct
  source 1..19: mol_type = other RNA
cactcttaatgcatatggg

SEQ ID NO: 2787 - RNA, 19 nt, synthetic construct
  source 1..19: mol_type = other RNA
ccactcttaatgcatatgg

SEQ ID NO: 2788 - RNA, 19 nt, synthetic construct
  source 1..19: mol_type = other RNA
tccactcttaatgcatatg

SEQ ID NO: 2789 - RNA, 19 nt, synthetic construct
  source 1..19: mol_type = other RNA
ttccactcttaatgcatat

SEQ ID NO: 2790 - RNA, 19 nt, synthetic construct
  source 1..19: mol_type = other RNA
gttccactcttaatgcata

SEQ ID NO: 2791 - RNA, 19 nt, synthetic construct
  source 1..19: mol_type = other RNA
agttccactcttaatgcat

SEQ ID NO: 2792 - RNA, 19 nt, synthetic construct
  source 1..19: mol_type = other RNA
cagttccactcttaatgca

SEQ ID NO: 2793 - RNA, 19 nt, synthetic construct
  source 1..19: mol_type = other RNA
ccagttccactcttaatgc

SEQ ID NO: 2794 - RNA, 19 nt, synthetic construct
  source 1..19: mol_type = other RNA
tccagttccactcttaatg

SEQ ID NO: 2795 - RNA, 19 nt, synthetic construct
  source 1..19: mol_type = other RNA
ttccagttccactcttaat

SEQ ID NO: 2796 - RNA, 19 nt, synthetic construct
  source 1..19: mol_type = other RNA
cttccagttccactcttaa

SEQ ID NO: 2797 - RNA, 19 nt, synthetic construct
  source 1..19: mol_type = other RNA
tcttccagttccactctta

SEQ ID NO: 2798 - RNA, 19 nt, synthetic construct
  source 1..19: mol_type = other RNA
gtcttccagttccactctt

SEQ ID NO: 2799 - RNA, 19 nt, synthetic construct
  source 1..19: mol_type = other RNA
agtcttccagttccactct

SEQ ID NO: 2800 - RNA, 19 nt, synthetic construct
  source 1..19: mol_type = other RNA
cagtcttccagttccactc

SEQ ID NO: 2801 - RNA, 19 nt, synthetic construct
  source 1..19: mol_type = other RNA
ccagtcttccagttccact

SEQ ID NO: 2802 - RNA, 19 nt, synthetic construct
  source 1..19: mol_type = other RNA
tccagtcttccagttccac

SEQ ID NO: 2803 - RNA, 19 nt, synthetic construct
  source 1..19: mol_type = other RNA
ttccagtcttccagttcca

SEQ ID NO: 2804 - RNA, 19 nt, synthetic construct
  source 1..19: mol_type = other RNA
attccagtcttccagttcc

SEQ ID NO: 2805 - RNA, 19 nt, synthetic construct
  source 1..19: mol_type = other RNA
cattccagtcttccagttc

SEQ ID NO: 2806 - RNA, 19 nt, synthetic construct
  source 1..19: mol_type = other RNA
ccattccagtcttccagtt

SEQ ID NO: 2807 - RNA, 19 nt, synthetic construct
  source 1..19: mol_type = other RNA
gccattccagtcttccagt

SEQ ID NO: 2808 - RNA, 19 nt, synthetic construct
  source 1..19: mol_type = other RNA
tgccattccagtcttccag

SEQ ID NO: 2809 - RNA, 19 nt, synthetic construct
  source 1..19: mol_type = other RNA
ctgccattccagtcttcca

SEQ ID NO: 2810 - RNA, 19 nt, synthetic construct
  source 1..19: mol_type = other RNA
tctgccattccagtcttcc

SEQ ID NO: 2811 - RNA, 19 nt, synthetic construct
  source 1..19: mol_type = other RNA
ttctgccattccagtcttc

SEQ ID NO: 2812 - RNA, 19 nt, synthetic construct
  source 1..19: mol_type = other RNA
gttctgccattccagtctt

SEQ ID NO: 2813 - RNA, 19 nt, synthetic construct
  source 1..19: mol_type = other RNA
ggttctgccattccagtct

SEQ ID NO: 2814 - RNA, 19 nt, synthetic construct
  source 1..19: mol_type = other RNA
tggttctgccattccagtc

SEQ ID NO: 2815 - RNA, 19 nt, synthetic construct
  source 1..19: mol_type = other RNA
ctggttctgccattccagt

SEQ ID NO: 2816 - RNA, 19 nt, synthetic construct
  source 1..19: mol_type = other RNA
actggttctgccattccag

SEQ ID NO: 2817 - RNA, 19 nt, synthetic construct
  source 1..19: mol_type = other RNA
tactggttctgccattcca

SEQ ID NO: 2818 - RNA, 19 nt, synthetic construct
  source 1..19: mol_type = other RNA
gtactggttctgccattcc

SEQ ID NO: 2819 - RNA, 19 nt, synthetic construct
  source 1..19: mol_type = other RNA
agtactggttctgccattc

SEQ ID NO: 2820 - RNA, 19 nt, synthetic construct
  source 1..19: mol_type = other RNA
cagtactggttctgccatt

SEQ ID NO: 2821 - RNA, 19 nt, synthetic construct
  source 1..19: mol_type = other RNA
gcagtactggttctgccat

SEQ ID NO: 2822 - RNA, 19 nt, synthetic construct
  source 1..19: mol_type = other RNA
tgcagtactggttctgcca

SEQ ID NO: 2823 - RNA, 19 nt, synthetic construct
  source 1..19: mol_type = other RNA
ctgcagtactggttctgcc

SEQ ID NO: 2824 - RNA, 19 nt, synthetic construct
  source 1..19: mol_type = other RNA
tctgcagtactggttctgc

SEQ ID NO: 2825 - RNA, 19 nt, synthetic construct
  source 1..19: mol_type = other RNA
gtctgcagtactggttctg

SEQ ID NO: 2826 - RNA, 19 nt, synthetic construct
  source 1..19: mol_type = other RNA
agtctgcagtactggttct

SEQ ID NO: 2827 - RNA, 19 nt, synthetic construct
  source 1..19: mol_type = other RNA
tagtctgcagtactggttc

SEQ ID NO: 2828 - RNA, 19 nt, synthetic construct
  source 1..19: mol_type = other RNA
atagtctgcagtactggtt

SEQ ID NO: 2829 - RNA, 19 nt, synthetic construct
  source 1..19: mol_type = other RNA
catagtctgcagtactggt

SEQ ID NO: 2830 - RNA, 19 nt, synthetic construct
  source 1..19: mol_type = other RNA
gcatagtctgcagtactgg

SEQ ID NO: 2831 - RNA, 19 nt, synthetic construct
  source 1..19: mol_type = other RNA
ggcatagtctgcagtactg

SEQ ID NO: 2832 - RNA, 19 nt, synthetic construct
  source 1..19: mol_type = other RNA
tggcatagtctgcagtact

SEQ ID NO: 2833 - RNA, 19 nt, synthetic construct
  source 1..19: mol_type = other RNA
atggcatagtctgcagtac

SEQ ID NO: 2834 - RNA, 19 nt, synthetic construct
  source 1..19: mol_type = other RNA
catggcatagtctgcagta

SEQ ID NO: 2835 - RNA, 19 nt, synthetic construct
  source 1..19: mol_type = other RNA
acatggcatagtctgcagt

SEQ ID NO: 2836 - RNA, 19 nt, synthetic construct
  source 1..19: mol_type = other RNA
aacatggcatagtctgcag

SEQ ID NO: 2837 - RNA, 19 nt, synthetic construct
  source 1..19: mol_type = other RNA
gaacatggcatagtctgca

SEQ ID NO: 2838 - RNA, 19 nt, synthetic construct
  source 1..19: mol_type = other RNA
tgaacatggcatagtctgc

SEQ ID NO: 2839 - RNA, 19 nt, synthetic construct
  source 1..19: mol_type = other RNA
ttgaacatggcatagtctg

SEQ ID NO: 2840 - RNA, 19 nt, synthetic construct
  source 1..19: mol_type = other RNA
cttgaacatggcatagtct

SEQ ID NO: 2841 - RNA, 19 nt, synthetic construct
  source 1..19: mol_type = other RNA
ccttgaacatggcatagtc

SEQ ID NO: 2842 - RNA, 19 nt, synthetic construct
  source 1..19: mol_type = other RNA
accttgaacatggcatagt

SEQ ID NO: 2843 - RNA, 19 nt, synthetic construct
  source 1..19: mol_type = other RNA
caccttgaacatggcatag

SEQ ID NO: 2844 - RNA, 19 nt, synthetic construct
  source 1..19: mol_type = other RNA
ccaccttgaacatggcata

SEQ ID NO: 2845 - RNA, 19 nt, synthetic construct
  source 1..19: mol_type = other RNA
cccaccttgaacatggcat

SEQ ID NO: 2846 - RNA, 19 nt, synthetic construct
  source 1..19: mol_type = other RNA
tcccaccttgaacatggca

SEQ ID NO: 2847 - RNA, 19 nt, synthetic construct
  source 1..19: mol_type = other RNA
gtcccaccttgaacatggc

SEQ ID NO: 2848 - RNA, 19 nt, synthetic construct
  source 1..19: mol_type = other RNA
ggtcccaccttgaacatgg

SEQ ID NO: 2849 - RNA, 19 nt, synthetic construct
  source 1..19: mol_type = other RNA
aggtcccaccttgaacatg

SEQ ID NO: 2850 - RNA, 19 nt, synthetic construct
  source 1..19: mol_type = other RNA
caggtcccaccttgaacat

SEQ ID NO: 2851 - RNA, 19 nt, synthetic construct
  source 1..19: mol_type = other RNA
tcaggtcccaccttgaaca

SEQ ID NO: 2852 - RNA, 19 nt, synthetic construct
  source 1..19: mol_type = other RNA
ttcaggtcccaccttgaac

SEQ ID NO: 2853 - RNA, 19 nt, synthetic construct
  source 1..19: mol_type = other RNA
cttcaggtcccaccttgaa

SEQ ID NO: 2854 - RNA, 19 nt, synthetic construct
  source 1..19: mol_type = other RNA
gcttcaggtcccaccttga

SEQ ID NO: 2855 - RNA, 19 nt, synthetic construct
  source 1..19: mol_type = other RNA
agcttcaggtcccaccttg

SEQ ID NO: 2856 - RNA, 19 nt, synthetic construct
  source 1..19: mol_type = other RNA
cagcttcaggtcccacctt

SEQ ID NO: 2857 - RNA, 19 nt, synthetic construct
  source 1..19: mol_type = other RNA
tcagcttcaggtcccacct

SEQ ID NO: 2858 - RNA, 19 nt, synthetic construct
  source 1..19: mol_type = other RNA
gtcagcttcaggtcccacc

SEQ ID NO: 2859 - RNA, 19 nt, synthetic construct
  source 1..19: mol_type = other RNA
tgtcagcttcaggtcccac

SEQ ID NO: 2860 - RNA, 19 nt, synthetic construct
  source 1..19: mol_type = other RNA
ttgtcagcttcaggtccca

SEQ ID NO: 2861 - RNA, 19 nt, synthetic construct
  source 1..19: mol_type = other RNA
cttgtcagcttcaggtccc

SEQ ID NO: 2862 - RNA, 19 nt, synthetic construct
  source 1..19: mol_type = other RNA
acttgtcagcttcaggtcc

SEQ ID NO: 2863 - RNA, 19 nt, synthetic construct
  source 1..19: mol_type = other RNA
tacttgtcagcttcaggtc

SEQ ID NO: 2864 - RNA, 19 nt, synthetic construct
  source 1..19: mol_type = other RNA
gtacttgtcagcttcaggt

SEQ ID NO: 2865 - RNA, 19 nt, synthetic construct
  source 1..19: mol_type = other RNA
ggtacttgtcagcttcagg

SEQ ID NO: 2866 - RNA, 19 nt, synthetic construct
  source 1..19: mol_type = other RNA
cggtacttgtcagcttcag

SEQ ID NO: 2867 - RNA, 19 nt, synthetic construct
  source 1..19: mol_type = other RNA
gcggtacttgtcagcttca

SEQ ID NO: 2868 - RNA, 19 nt, synthetic construct
  source 1..19: mol_type = other RNA
ggcggtacttgtcagcttc

SEQ ID NO: 2869 - RNA, 19 nt, synthetic construct
  source 1..19: mol_type = other RNA
aggcggtacttgtcagctt

SEQ ID NO: 2870 - RNA, 19 nt, synthetic construct
  source 1..19: mol_type = other RNA
taggcggtacttgtcagct

SEQ ID NO: 2871 - RNA, 19 nt, synthetic construct
  source 1..19: mol_type = other RNA
ttaggcggtacttgtcagc

SEQ ID NO: 2872 - RNA, 19 nt, synthetic construct
  source 1..19: mol_type = other RNA
gttaggcggtacttgtcag

SEQ ID NO: 2873 - RNA, 19 nt, synthetic construct
  source 1..19: mol_type = other RNA
tgttaggcggtacttgtca

SEQ ID NO: 2874 - RNA, 19 nt, synthetic construct
  source 1..19: mol_type = other RNA
atgttaggcggtacttgtc

SEQ ID NO: 2875 - RNA, 19 nt, synthetic construct
  source 1..19: mol_type = other RNA
tatgttaggcggtacttgt

SEQ ID NO: 2876 - RNA, 19 nt, synthetic construct
  source 1..19: mol_type = other RNA
atatgttaggcggtacttg

SEQ ID NO: 2877 - RNA, 19 nt, synthetic construct
  source 1..19: mol_type = other RNA
catatgttaggcggtactt

SEQ ID NO: 2878 - RNA, 19 nt, synthetic construct
  source 1..19: mol_type = other RNA
gcatatgttaggcggtact

SEQ ID NO: 2879 - RNA, 19 nt, synthetic construct
  source 1..19: mol_type = other RNA
ggcatatgttaggcggtac

SEQ ID NO: 2880 - RNA, 19 nt, synthetic construct
  source 1..19: mol_type = other RNA
aggcatatgttaggcggta

SEQ ID NO: 2881 - RNA, 19 nt, synthetic construct
  source 1..19: mol_type = other RNA
taggcatatgttaggcggt

SEQ ID NO: 2882 - RNA, 19 nt, synthetic construct
  source 1..19: mol_type = other RNA
gtaggcatatgttaggcgg

SEQ ID NO: 2883 - RNA, 19 nt, synthetic construct
  source 1..19: mol_type = other RNA
agtaggcatatgttaggcg

SEQ ID NO: 2884 - RNA, 19 nt, synthetic construct
  source 1..19: mol_type = other RNA
aagtaggcatatgttaggc

SEQ ID NO: 2885 - RNA, 19 nt, synthetic construct
  source 1..19: mol_type = other RNA
gaagtaggcatatgttagg

SEQ ID NO: 2886 - RNA, 19 nt, synthetic construct
  source 1..19: mol_type = other RNA
cgaagtaggcatatgttag

SEQ ID NO: 2887 - RNA, 19 nt, synthetic construct
  source 1..19: mol_type = other RNA
gcgaagtaggcatatgtta

SEQ ID NO: 2888 - RNA, 19 nt, synthetic construct
  source 1..19: mol_type = other RNA
agcgaagtaggcatatgtt

SEQ ID NO: 2889 - RNA, 19 nt, synthetic construct
  source 1..19: mol_type = other RNA
cagcgaagtaggcatatgt

SEQ ID NO: 2890 - RNA, 19 nt, synthetic construct
  source 1..19: mol_type = other RNA
ccagcgaagtaggcatatg

SEQ ID NO: 2891 - RNA, 19 nt, synthetic construct
  source 1..19: mol_type = other RNA
accagcgaagtaggcatat

SEQ ID NO: 2892 - RNA, 19 nt, synthetic construct
  source 1..19: mol_type = other RNA
caccagcgaagtaggcata

SEQ ID NO: 2893 - RNA, 19 nt, synthetic construct
  source 1..19: mol_type = other RNA
ccaccagcgaagtaggcat

SEQ ID NO: 2894 - RNA, 19 nt, synthetic construct
  source 1..19: mol_type = other RNA
cccaccagcgaagtaggca

SEQ ID NO: 2895 - RNA, 19 nt, synthetic construct
  source 1..19: mol_type = other RNA
ccccaccagcgaagtaggc

SEQ ID NO: 2896 - RNA, 19 nt, synthetic construct
  source 1..19: mol_type = other RNA
tccccaccagcgaagtagg

SEQ ID NO: 2897 - RNA, 19 nt, synthetic construct
  source 1..19: mol_type = other RNA
atccccaccagcgaagtag

SEQ ID NO: 2898 - RNA, 19 nt, synthetic construct
  source 1..19: mol_type = other RNA
catccccaccagcgaagta

SEQ ID NO: 2899 - RNA, 19 nt, synthetic construct
  source 1..19: mol_type = other RNA
gcatccccaccagcgaagt

SEQ ID NO: 2900 - RNA, 19 nt, synthetic construct
  source 1..19: mol_type = other RNA
agcatccccaccagcgaag

SEQ ID NO: 2901 - RNA, 19 nt, synthetic construct
  source 1..19: mol_type = other RNA
cagcatccccaccagcgaa

SEQ ID NO: 2902 - RNA, 19 nt, synthetic construct
  source 1..19: mol_type = other RNA
ccagcatccccaccagcga

SEQ ID NO: 2903 - RNA, 19 nt, synthetic construct
  source 1..19: mol_type = other RNA
tccagcatccccaccagcg

SEQ ID NO: 2904 - RNA, 19 nt, synthetic construct
  source 1..19: mol_type = other RNA
ctccagcatccccaccagc

SEQ ID NO: 2905 - RNA, 19 nt, synthetic construct
  source 1..19: mol_type = other RNA
tctccagcatccccaccag

SEQ ID NO: 2906 - RNA, 19 nt, synthetic construct
  source 1..19: mol_type = other RNA
atctccagcatccccacca

SEQ ID NO: 2907 - RNA, 19 nt, synthetic construct
  source 1..19: mol_type = other RNA
catctccagcatccccacc

SEQ ID NO: 2908 - RNA, 19 nt, synthetic construct
  source 1..19: mol_type = other RNA
gcatctccagcatccccac

SEQ ID NO: 2909 - RNA, 19 nt, synthetic construct
  source 1..19: mol_type = other RNA
ggcatctccagcatcccca

SEQ ID NO: 2910 - RNA, 19 nt, synthetic construct
  source 1..19: mol_type = other RNA
aggcatctccagcatcccc

SEQ ID NO: 2911 - RNA, 19 nt, synthetic construct
  source 1..19: mol_type = other RNA
aaggcatctccagcatccc

SEQ ID NO: 2912 - RNA, 19 nt, synthetic construct
  source 1..19: mol_type = other RNA
aaaggcatctccagcatcc

SEQ ID NO: 2913 - RNA, 19 nt, synthetic construct
  source 1..19: mol_type = other RNA
caaaggcatctccagcatc

SEQ ID NO: 2914 - RNA, 19 nt, synthetic construct
  source 1..19: mol_type = other RNA
tcaaaggcatctccagcat

SEQ ID NO: 2915 - RNA, 19 nt, synthetic construct
  source 1..19: mol_type = other RNA
atcaaaggcatctccagca

SEQ ID NO: 2916 - RNA, 19 nt, synthetic construct
  source 1..19: mol_type = other RNA
catcaaaggcatctccagc

SEQ ID NO: 2917 - RNA, 19 nt, synthetic construct
  source 1..19: mol_type = other RNA
ccatcaaaggcatctccag

SEQ ID NO: 2918 - RNA, 19 nt, synthetic construct
  source 1..19: mol_type = other RNA
gccatcaaaggcatctcca

SEQ ID NO: 2919 - RNA, 19 nt, synthetic construct
  source 1..19: mol_type = other RNA
agccatcaaaggcatctcc

SEQ ID NO: 2920 - RNA, 19 nt, synthetic construct
  source 1..19: mol_type = other RNA
aagccatcaaaggcatctc

SEQ ID NO: 2921 - RNA, 19 nt, synthetic construct
  source 1..19: mol_type = other RNA
aaagccatcaaaggcatct

SEQ ID NO: 2922 - RNA, 19 nt, synthetic construct
  source 1..19: mol_type = other RNA
caaagccatcaaaggcatc

SEQ ID NO: 2923 - RNA, 19 nt, synthetic construct
  source 1..19: mol_type = other RNA
tcaaagccatcaaaggcat

SEQ ID NO: 2924 - RNA, 19 nt, synthetic construct
  source 1..19: mol_type = other RNA
atcaaagccatcaaaggca

SEQ ID NO: 2925 - RNA, 19 nt, synthetic construct
  source 1..19: mol_type = other RNA
aatcaaagccatcaaaggc

SEQ ID NO: 2926 - RNA, 19 nt, synthetic construct
  source 1..19: mol_type = other RNA
aaatcaaagccatcaaagg

SEQ ID NO: 2927 - RNA, 19 nt, synthetic construct
  source 1..19: mol_type = other RNA
aaaatcaaagccatcaaag

SEQ ID NO: 2928 - RNA, 19 nt, synthetic construct
  source 1..19: mol_type = other RNA
caaaatcaaagccatcaaa

SEQ ID NO: 2929 - RNA, 19 nt, synthetic construct
  source 1..19: mol_type = other RNA
ccaaaatcaaagccatcaa

SEQ ID NO: 2930 - RNA, 19 nt, synthetic construct
  source 1..19: mol_type = other RNA
gccaaaatcaaagccatca

SEQ ID NO: 2931 - RNA, 19 nt, synthetic construct
  source 1..19: mol_type = other RNA
cgccaaaatcaaagccatc

SEQ ID NO: 2932 - RNA, 19 nt, synthetic construct
  source 1..19: mol_type = other RNA
tcgccaaaatcaaagccat

SEQ ID NO: 2933 - RNA, 19 nt, synthetic construct
  source 1..19: mol_type = other RNA
atcgccaaaatcaaagcca

SEQ ID NO: 2934 - RNA, 19 nt, synthetic construct
  source 1..19: mol_type = other RNA
catcgccaaaatcaaagcc

SEQ ID NO: 2935 - RNA, 19 nt, synthetic construct
  source 1..19: mol_type = other RNA
tcatcgccaaaatcaaagc

SEQ ID NO: 2936 - RNA, 19 nt, synthetic construct
  source 1..19: mol_type = other RNA
atcatcgccaaaatcaaag

SEQ ID NO: 2937 - RNA, 19 nt, synthetic construct
  source 1..19: mol_type = other RNA
gatcatcgccaaaatcaaa

SEQ ID NO: 2938 - RNA, 19 nt, synthetic construct
  source 1..19: mol_type = other RNA
ggatcatcgccaaaatcaa

SEQ ID NO: 2939 - RNA, 19 nt, synthetic construct
  source 1..19: mol_type = other RNA
aggatcatcgccaaaatca

SEQ ID NO: 2940 - RNA, 19 nt, synthetic construct
  source 1..19: mol_type = other RNA
taggatcatcgccaaaatc

SEQ ID NO: 2941 - RNA, 19 nt, synthetic construct
  source 1..19: mol_type = other RNA
ctaggatcatcgccaaaat

SEQ ID NO: 2942 - RNA, 19 nt, synthetic construct
  source 1..19: mol_type = other RNA
actaggatcatcgccaaaa

SEQ ID NO: 2943 - RNA, 19 nt, synthetic construct
  source 1..19: mol_type = other RNA
cactaggatcatcgccaaa

SEQ ID NO: 2944 - RNA, 19 nt, synthetic construct
  source 1..19: mol_type = other RNA
tcactaggatcatcgccaa

SEQ ID NO: 2945 - RNA, 19 nt, synthetic construct
  source 1..19: mol_type = other RNA
gtcactaggatcatcgcca

SEQ ID NO: 2946 - RNA, 19 nt, synthetic construct
  source 1..19: mol_type = other RNA
tgtcactaggatcatcgcc

SEQ ID NO: 2947 - RNA, 19 nt, synthetic construct
  source 1..19: mol_type = other RNA
ttgtcactaggatcatcgc

SEQ ID NO: 2948 - RNA, 19 nt, synthetic construct
  source 1..19: mol_type = other RNA
cttgtcactaggatcatcg

SEQ ID NO: 2949 - RNA, 19 nt, synthetic construct
  source 1..19: mol_type = other RNA
acttgtcactaggatcatc

SEQ ID NO: 2950 - RNA, 19 nt, synthetic construct
  source 1..19: mol_type = other RNA
aacttgtcactaggatcat

SEQ ID NO: 2951 - RNA, 19 nt, synthetic construct
  source 1..19: mol_type = other RNA
aaacttgtcactaggatca

SEQ ID NO: 2952 - RNA, 19 nt, synthetic construct
  source 1..19: mol_type = other RNA
aaaacttgtcactaggatc

SEQ ID NO: 2953 - RNA, 19 nt, synthetic construct
  source 1..19: mol_type = other RNA
aaaaacttgtcactaggat

SEQ ID NO: 2954 - RNA, 19 nt, synthetic construct
  source 1..19: mol_type = other RNA
gaaaaacttgtcactagga

SEQ ID NO: 2955 - RNA, 19 nt, synthetic construct
  source 1..19: mol_type = other RNA
tgaaaaacttgtcactagg

SEQ ID NO: 2956 - RNA, 19 nt, synthetic construct
  source 1..19: mol_type = other RNA
gtgaaaaacttgtcactag

SEQ ID NO: 2957 - RNA, 19 nt, synthetic construct
  source 1..19: mol_type = other RNA
tgtgaaaaacttgtcacta

SEQ ID NO: 2958 - RNA, 19 nt, synthetic construct
  source 1..19: mol_type = other RNA
atgtgaaaaacttgtcact

SEQ ID NO: 2959 - RNA, 19 nt, synthetic construct
  source 1..19: mol_type = other RNA
gatgtgaaaaacttgtcac

SEQ ID NO: 2960 - RNA, 19 nt, synthetic construct
  source 1..19: mol_type = other RNA
ggatgtgaaaaacttgtca

SEQ ID NO: 2961 - RNA, 19 nt, synthetic construct
  source 1..19: mol_type = other RNA
gggatgtgaaaaacttgtc

SEQ ID NO: 2962 - RNA, 19 nt, synthetic construct
  source 1..19: mol_type = other RNA
tgggatgtgaaaaacttgt

SEQ ID NO: 2963 - RNA, 19 nt, synthetic construct
  source 1..19: mol_type = other RNA
atgggatgtgaaaaacttg

SEQ ID NO: 2964 - RNA, 19 nt, synthetic construct
  source 1..19: mol_type = other RNA
tatgggatgtgaaaaactt

SEQ ID NO: 2965 - RNA, 19 nt, synthetic construct
  source 1..19: mol_type = other RNA
ttatgggatgtgaaaaact

SEQ ID NO: 2966 - RNA, 19 nt, synthetic construct
  source 1..19: mol_type = other RNA
attatgggatgtgaaaaac

SEQ ID NO: 2967 - RNA, 19 nt, synthetic construct
  source 1..19: mol_type = other RNA
cattatgggatgtgaaaaa

SEQ ID NO: 2968 - RNA, 19 nt, synthetic construct
  source 1..19: mol_type = other RNA
ccattatgggatgtgaaaa

SEQ ID NO: 2969 - RNA, 19 nt, synthetic construct
  source 1..19: mol_type = other RNA
gccattatgggatgtgaaa

SEQ ID NO: 2970 - RNA, 19 nt, synthetic construct
  source 1..19: mol_type = other RNA
tgccattatgggatgtgaa

SEQ ID NO: 2971 - RNA, 19 nt, synthetic construct
  source 1..19: mol_type = other RNA
atgccattatgggatgtga

SEQ ID NO: 2972 - RNA, 19 nt, synthetic construct
  source 1..19: mol_type = other RNA
catgccattatgggatgtg

SEQ ID NO: 2973 - RNA, 19 nt, synthetic construct
  source 1..19: mol_type = other RNA
gcatgccattatgggatgt

SEQ ID NO: 2974 - RNA, 19 nt, synthetic construct
  source 1..19: mol_type = other RNA
tgcatgccattatgggatg

SEQ ID NO: 2975 - RNA, 19 nt, synthetic construct
  source 1..19: mol_type = other RNA
ctgcatgccattatgggat

SEQ ID NO: 2976 - RNA, 19 nt, synthetic construct
  source 1..19: mol_type = other RNA
actgcatgccattatggga

SEQ ID NO: 2977 - RNA, 19 nt, synthetic construct
  source 1..19: mol_type = other RNA
aactgcatgccattatggg

SEQ ID NO: 2978 - RNA, 19 nt, synthetic construct
  source 1..19: mol_type = other RNA
gaactgcatgccattatgg

SEQ ID NO: 2979 - RNA, 19 nt, synthetic construct
  source 1..19: mol_type = other RNA
tgaactgcatgccattatg

SEQ ID NO: 2980 - RNA, 19 nt, synthetic construct
  source 1..19: mol_type = other RNA
ctgaactgcatgccattat

SEQ ID NO: 2981 - RNA, 19 nt, synthetic construct
  source 1..19: mol_type = other RNA
actgaactgcatgccatta

SEQ ID NO: 2982 - RNA, 19 nt, synthetic construct
  source 1..19: mol_type = other RNA
tactgaactgcatgccatt

SEQ ID NO: 2983 - RNA, 19 nt, synthetic construct
  source 1..19: mol_type = other RNA
gtactgaactgcatgccat

SEQ ID NO: 2984 - RNA, 19 nt, synthetic construct
  source 1..19: mol_type = other RNA
ggtactgaactgcatgcca

SEQ ID NO: 2985 - RNA, 19 nt, synthetic construct
  source 1..19: mol_type = other RNA
aggtactgaactgcatgcc

SEQ ID NO: 2986 - RNA, 19 nt, synthetic construct
  source 1..19: mol_type = other RNA
caggtactgaactgcatgc

SEQ ID NO: 2987 - RNA, 19 nt, synthetic construct
  source 1..19: mol_type = other RNA
ccaggtactgaactgcatg

SEQ ID NO: 2988 - RNA, 19 nt, synthetic construct
  source 1..19: mol_type = other RNA
cccaggtactgaactgcat

SEQ ID NO: 2989 - RNA, 19 nt, synthetic construct
  source 1..19: mol_type = other RNA
tcccaggtactgaactgca

SEQ ID NO: 2990 - RNA, 19 nt, synthetic construct
  source 1..19: mol_type = other RNA
gtcccaggtactgaactgc

SEQ ID NO: 2991 - RNA, 19 nt, synthetic construct
  source 1..19: mol_type = other RNA
tgtcccaggtactgaactg

SEQ ID NO: 2992 - RNA, 19 nt, synthetic construct
  source 1..19: mol_type = other RNA
ttgtcccaggtactgaact

SEQ ID NO: 2993 - RNA, 19 nt, synthetic construct
  source 1..19: mol_type = other RNA
attgtcccaggtactgaac

SEQ ID NO: 2994 - RNA, 19 nt, synthetic construct
  source 1..19: mol_type = other RNA
cattgtcccaggtactgaa

SEQ ID NO: 2995 - RNA, 19 nt, synthetic construct
  source 1..19: mol_type = other RNA
tcattgtcccaggtactga

SEQ ID NO: 2996 - RNA, 19 nt, synthetic construct
  source 1..19: mol_type = other RNA
gtcattgtcccaggtactg

SEQ ID NO: 2997 - RNA, 19 nt, synthetic construct
  source 1..19: mol_type = other RNA
tgtcattgtcccaggtact

SEQ ID NO: 2998 - RNA, 19 nt, synthetic construct
  source 1..19: mol_type = other RNA
ttgtcattgtcccaggtac

SEQ ID NO: 2999 - RNA, 19 nt, synthetic construct
  source 1..19: mol_type = other RNA
attgtcattgtcccaggta

SEQ ID NO: 3000 - RNA, 19 nt, synthetic construct
  source 1..19: mol_type = other RNA
cattgtcattgtcccaggt

SEQ ID NO: 3001 - RNA, 19 nt, synthetic construct
  source 1..19: mol_type = other RNA
tcattgtcattgtcccagg

SEQ ID NO: 3002 - RNA, 19 nt, synthetic construct
  source 1..19: mol_type = other RNA
atcattgtcattgtcccag

SEQ ID NO: 3003 - RNA, 19 nt, synthetic construct
  source 1..19: mol_type = other RNA
tatcattgtcattgtccca

SEQ ID NO: 3004 - RNA, 19 nt, synthetic construct
  source 1..19: mol_type = other RNA
ttatcattgtcattgtccc

SEQ ID NO: 3005 - RNA, 19 nt, synthetic construct
  source 1..19: mol_type = other RNA
cttatcattgtcattgtcc

SEQ ID NO: 3006 - RNA, 19 nt, synthetic construct
  source 1..19: mol_type = other RNA
acttatcattgtcattgtc

SEQ ID NO: 3007 - RNA, 19 nt, synthetic construct
  source 1..19: mol_type = other RNA
aacttatcattgtcattgt

SEQ ID NO: 3008 - RNA, 19 nt, synthetic construct
  source 1..19: mol_type = other RNA
aaacttatcattgtcattg

SEQ ID NO: 3009 - RNA, 19 nt, synthetic construct
  source 1..19: mol_type = other RNA
caaacttatcattgtcatt

SEQ ID NO: 3010 - RNA, 19 nt, synthetic construct
  source 1..19: mol_type = other RNA
tcaaacttatcattgtcat

SEQ ID NO: 3011 - RNA, 19 nt, synthetic construct
  source 1..19: mol_type = other RNA
ttcaaacttatcattgtca

SEQ ID NO: 3012 - RNA, 19 nt, synthetic construct
  source 1..19: mol_type = other RNA
cttcaaacttatcattgtc

SEQ ID NO: 3013 - RNA, 19 nt, synthetic construct
  source 1..19: mol_type = other RNA
ccttcaaacttatcattgt

SEQ ID NO: 3014 - RNA, 19 nt, synthetic construct
  source 1..19: mol_type = other RNA
gccttcaaacttatcattg

SEQ ID NO: 3015 - RNA, 19 nt, synthetic construct
  source 1..19: mol_type = other RNA
tgccttcaaacttatcatt

SEQ ID NO: 3016 - RNA, 19 nt, synthetic construct
  source 1..19: mol_type = other RNA
ttgccttcaaacttatcat

SEQ ID NO: 3017 - RNA, 19 nt, synthetic construct
  source 1..19: mol_type = other RNA
gttgccttcaaacttatca

SEQ ID NO: 3018 - RNA, 19 nt, synthetic construct
  source 1..19: mol_type = other RNA
agttgccttcaaacttatc

SEQ ID NO: 3019 - RNA, 19 nt, synthetic construct
  source 1..19: mol_type = other RNA
cagttgccttcaaacttat

SEQ ID NO: 3020 - RNA, 19 nt, synthetic construct
  source 1..19: mol_type = other RNA
acagttgccttcaaactta

SEQ ID NO: 3021 - RNA, 19 nt, synthetic construct
  source 1..19: mol_type = other RNA
cacagttgccttcaaactt

SEQ ID NO: 3022 - RNA, 19 nt, synthetic construct
  source 1..19: mol_type = other RNA
gcacagttgccttcaaact

SEQ ID NO: 3023 - RNA, 19 nt, synthetic construct
  source 1..19: mol_type = other RNA
agcacagttgccttcaaac

SEQ ID NO: 3024 - RNA, 19 nt, synthetic construct
  source 1..19: mol_type = other RNA
cagcacagttgccttcaaa

SEQ ID NO: 3025 - RNA, 19 nt, synthetic construct
  source 1..19: mol_type = other RNA
tcagcacagttgccttcaa

SEQ ID NO: 3026 - RNA, 19 nt, synthetic construct
  source 1..19: mol_type = other RNA
ttcagcacagttgccttca

SEQ ID NO: 3027 - RNA, 19 nt, synthetic construct
  source 1..19: mol_type = other RNA
gttcagcacagttgccttc

SEQ ID NO: 3028 - RNA, 19 nt, synthetic construct
  source 1..19: mol_type = other RNA
tgttcagcacagttgcctt

SEQ ID NO: 3029 - RNA, 19 nt, synthetic construct
  source 1..19: mol_type = other RNA
ctgttcagcacagttgcct

SEQ ID NO: 3030 - RNA, 19 nt, synthetic construct
  source 1..19: mol_type = other RNA
cctgttcagcacagttgcc

SEQ ID NO: 3031 - RNA, 19 nt, synthetic construct
  source 1..19: mol_type = other RNA
tcctgttcagcacagttgc

SEQ ID NO: 3032 - RNA, 19 nt, synthetic construct
  source 1..19: mol_type = other RNA
atcctgttcagcacagttg

SEQ ID NO: 3033 - RNA, 19 nt, synthetic construct
  source 1..19: mol_type = other RNA
catcctgttcagcacagtt

SEQ ID NO: 3034 - RNA, 19 nt, synthetic construct
  source 1..19: mol_type = other RNA
ccatcctgttcagcacagt

SEQ ID NO: 3035 - RNA, 19 nt, synthetic construct
  source 1..19: mol_type = other RNA
tccatcctgttcagcacag

SEQ ID NO: 3036 - RNA, 19 nt, synthetic construct
  source 1..19: mol_type = other RNA
atccatcctgttcagcaca

SEQ ID NO: 3037 - RNA, 19 nt, synthetic construct
  source 1..19: mol_type = other RNA
gatccatcctgttcagcac

SEQ ID NO: 3038 - RNA, 19 nt, synthetic construct
  source 1..19: mol_type = other RNA
agatccatcctgttcagca

SEQ ID NO: 3039 - RNA, 19 nt, synthetic construct
  source 1..19: mol_type = other RNA
cagatccatcctgttcagc

SEQ ID NO: 3040 - RNA, 19 nt, synthetic construct
  source 1..19: mol_type = other RNA
ccagatccatcctgttcag

SEQ ID NO: 3041 - RNA, 19 nt, synthetic construct
  source 1..19: mol_type = other RNA
accagatccatcctgttca

SEQ ID NO: 3042 - RNA, 19 nt, synthetic construct
  source 1..19: mol_type = other RNA
aaccagatccatcctgttc

SEQ ID NO: 3043 - RNA, 19 nt, synthetic construct
  source 1..19: mol_type = other RNA
caaccagatccatcctgtt

SEQ ID NO: 3044 - RNA, 19 nt, synthetic construct
  source 1..19: mol_type = other RNA
ccaaccagatccatcctgt

SEQ ID NO: 3045 - RNA, 19 nt, synthetic construct
  source 1..19: mol_type = other RNA
accaaccagatccatcctg

SEQ ID NO: 3046 - RNA, 19 nt, synthetic construct
  source 1..19: mol_type = other RNA
caccaaccagatccatcct

SEQ ID NO: 3047 - RNA, 19 nt, synthetic construct
  source 1..19: mol_type = other RNA
ccaccaaccagatccatcc

SEQ ID NO: 3048 - RNA, 19 nt, synthetic construct
  source 1..19: mol_type = other RNA
tccaccaaccagatccatc

SEQ ID NO: 3049 - RNA, 19 nt, synthetic construct
  source 1..19: mol_type = other RNA
atccaccaaccagatccat

SEQ ID NO: 3050 - RNA, 19 nt, synthetic construct
  source 1..19: mol_type = other RNA
catccaccaaccagatcca

SEQ ID NO: 3051 - RNA, 19 nt, synthetic construct
  source 1..19: mol_type = other RNA
tcatccaccaaccagatcc

SEQ ID NO: 3052 - RNA, 19 nt, synthetic construct
  source 1..19: mol_type = other RNA
ttcatccaccaaccagatc

SEQ ID NO: 3053 - RNA, 19 nt, synthetic construct
  source 1..19: mol_type = other RNA
gttcatccaccaaccagat

SEQ ID NO: 3054 - RNA, 19 nt, synthetic construct
  source 1..19: mol_type = other RNA
tgttcatccaccaaccaga

SEQ ID NO: 3055 - RNA, 19 nt, synthetic construct
  source 1..19: mol_type = other RNA
ttgttcatccaccaaccag

SEQ ID NO: 3056 - RNA, 19 nt, synthetic construct
  source 1..19: mol_type = other RNA
cttgttcatccaccaacca

SEQ ID NO: 3057 - RNA, 19 nt, synthetic construct
  source 1..19: mol_type = other RNA
acttgttcatccaccaacc

SEQ ID NO: 3058 - RNA, 19 nt, synthetic construct
  source 1..19: mol_type = other RNA
cacttgttcatccaccaac

SEQ ID NO: 3059 - RNA, 19 nt, synthetic construct
  source 1..19: mol_type = other RNA
acacttgttcatccaccaa

SEQ ID NO: 3060 - RNA, 19 nt, synthetic construct
  source 1..19: mol_type = other RNA
gacacttgttcatccacca

SEQ ID NO: 3061 - RNA, 19 nt, synthetic construct
  source 1..19: mol_type = other RNA
tgacacttgttcatccacc

SEQ ID NO: 3062 - RNA, 19 nt, synthetic construct
  source 1..19: mol_type = other RNA
gtgacacttgttcatccac

SEQ ID NO: 3063 - RNA, 19 nt, synthetic construct
  source 1..19: mol_type = other RNA
cgtgacacttgttcatcca

SEQ ID NO: 3064 - RNA, 19 nt, synthetic construct
  source 1..19: mol_type = other RNA
gcgtgacacttgttcatcc

SEQ ID NO: 3065 - RNA, 19 nt, synthetic construct
  source 1..19: mol_type = other RNA
agcgtgacacttgttcatc

SEQ ID NO: 3066 - RNA, 19 nt, synthetic construct
  source 1..19: mol_type = other RNA
cagcgtgacacttgttcat

SEQ ID NO: 3067 - RNA, 19 nt, synthetic construct
  source 1..19: mol_type = other RNA
ccagcgtgacacttgttca

SEQ ID NO: 3068 - RNA, 19 nt, synthetic construct
  source 1..19: mol_type = other RNA
gccagcgtgacacttgttc

SEQ ID NO: 3069 - RNA, 19 nt, synthetic construct
  source 1..19: mol_type = other RNA
ggccagcgtgacacttgtt

SEQ ID NO: 3070 - RNA, 19 nt, synthetic construct
  source 1..19: mol_type = other RNA
tggccagcgtgacacttgt

SEQ ID NO: 3071 - RNA, 19 nt, synthetic construct
  source 1..19: mol_type = other RNA
atggccagcgtgacacttg

SEQ ID NO: 3072 - RNA, 19 nt, synthetic construct
  source 1..19: mol_type = other RNA
gatggccagcgtgacactt

SEQ ID NO: 3073 - RNA, 19 nt, synthetic construct
  source 1..19: mol_type = other RNA
agatggccagcgtgacact

SEQ ID NO: 3074 - RNA, 19 nt, synthetic construct
  source 1..19: mol_type = other RNA
gagatggccagcgtgacac

SEQ ID NO: 3075 - RNA, 19 nt, synthetic construct
  source 1..19: mol_type = other RNA
tgagatggccagcgtgaca

SEQ ID NO: 3076 - RNA, 19 nt, synthetic construct
  source 1..19: mol_type = other RNA
ttgagatggccagcgtgac

SEQ ID NO: 3077 - RNA, 19 nt, synthetic construct
  source 1..19: mol_type = other RNA
attgagatggccagcgtga

SEQ ID NO: 3078 - RNA, 19 nt, synthetic construct
  source 1..19: mol_type = other RNA
cattgagatggccagcgtg

SEQ ID NO: 3079 - RNA, 19 nt, synthetic construct
  source 1..19: mol_type = other RNA
ccattgagatggccagcgt

SEQ ID NO: 3080 - RNA, 19 nt, synthetic construct
  source 1..19: mol_type = other RNA
tccattgagatggccagcg

SEQ ID NO: 3081 - RNA, 19 nt, synthetic construct
  source 1..19: mol_type = other RNA
ctccattgagatggccagc

SEQ ID NO: 3082 - RNA, 19 nt, synthetic construct
  source 1..19: mol_type = other RNA
actccattgagatggccag

SEQ ID NO: 3083 - RNA, 19 nt, synthetic construct
  source 1..19: mol_type = other RNA
aactccattgagatggcca

SEQ ID NO: 3084 - RNA, 19 nt, synthetic construct
  source 1..19: mol_type = other RNA
aaactccattgagatggcc

SEQ ID NO: 3085 - RNA, 19 nt, synthetic construct
  source 1..19: mol_type = other RNA
taaactccattgagatggc

SEQ ID NO: 3086 - RNA, 19 nt, synthetic construct
  source 1..19: mol_type = other RNA
ataaactccattgagatgg

SEQ ID NO: 3087 - RNA, 19 nt, synthetic construct
  source 1..19: mol_type = other RNA
aataaactccattgagatg

SEQ ID NO: 3088 - RNA, 19 nt, synthetic construct
  source 1..19: mol_type = other RNA
taataaactccattgagat

SEQ ID NO: 3089 - RNA, 19 nt, synthetic construct
  source 1..19: mol_type = other RNA
gtaataaactccattgaga

SEQ ID NO: 3090 - DNA, 19 bp, synthetic construct
  source 1..19: mol_type = other DNA
ggtaataaactccattgag

SEQ ID NO: 3091 - RNA, 19 nt, synthetic construct
  source 1..19: mol_type = other RNA
tggtaataaactccattga

SEQ ID NO: 3092 - RNA, 19 nt, synthetic construct
  source 1..19: mol_type = other RNA
ttggtaataaactccattg

SEQ ID NO: 3093 - RNA, 19 nt, synthetic construct
  source 1..19: mol_type = other RNA
cttggtaataaactccatt

SEQ ID NO: 3094 - RNA, 19 nt, synthetic construct
  source 1..19: mol_type = other RNA
ccttggtaataaactccat

SEQ ID NO: 3095 - RNA, 19 nt, synthetic construct
  source 1..19: mol_type = other RNA
accttggtaataaactcca

SEQ ID NO: 3096 - RNA, 19 nt, synthetic construct
  source 1..19: mol_type = other RNA
caccttggtaataaactcc

SEQ ID NO: 3097 - RNA, 19 nt, synthetic construct
  source 1..19: mol_type = other RNA
ccaccttggtaataaactc

SEQ ID NO: 3098 - RNA, 19 nt, synthetic construct
  source 1..19: mol_type = other RNA
gccaccttggtaataaact

SEQ ID NO: 3099 - RNA, 19 nt, synthetic construct
  source 1..19: mol_type = other RNA
tgccaccttggtaataaac

SEQ ID NO: 3100 - RNA, 19 nt, synthetic construct
  source 1..19: mol_type = other RNA
gtgccaccttggtaataaa

SEQ ID NO: 3101 - RNA, 19 nt, synthetic construct
  source 1..19: mol_type = other RNA
agtgccaccttggtaataa

SEQ ID NO: 3102 - RNA, 19 nt, synthetic construct
  source 1..19: mol_type = other RNA
aagtgccaccttggtaata

SEQ ID NO: 3103 - RNA, 19 nt, synthetic construct
  source 1..19: mol_type = other RNA
taagtgccaccttggtaat

SEQ ID NO: 3104 - RNA, 19 nt, synthetic construct
  source 1..19: mol_type = other RNA
gtaagtgccaccttggtaa

SEQ ID NO: 3105 - RNA, 19 nt, synthetic construct
  source 1..19: mol_type = other RNA
agtaagtgccaccttggta

SEQ ID NO: 3106 - RNA, 19 nt, synthetic construct
  source 1..19: mol_type = other RNA
gagtaagtgccaccttggt

SEQ ID NO: 3107 - RNA, 19 nt, synthetic construct
  source 1..19: mol_type = other RNA
tgagtaagtgccaccttgg

SEQ ID NO: 3108 - RNA, 19 nt, synthetic construct
  source 1..19: mol_type = other RNA
ttgagtaagtgccaccttg

SEQ ID NO: 3109 - RNA, 19 nt, synthetic construct
  source 1..19: mol_type = other RNA
tttgagtaagtgccacctt

SEQ ID NO: 3110 - RNA, 19 nt, synthetic construct
  source 1..19: mol_type = other RNA
ttttgagtaagtgccacct

SEQ ID NO: 3111 - RNA, 19 nt, synthetic construct
  source 1..19: mol_type = other RNA
cttttgagtaagtgccacc

SEQ ID NO: 3112 - RNA, 19 nt, synthetic construct
  source 1..19: mol_type = other RNA
gcttttgagtaagtgccac

SEQ ID NO: 3113 - RNA, 19 nt, synthetic construct
  source 1..19: mol_type = other RNA
tgcttttgagtaagtgcca

SEQ ID NO: 3114 - RNA, 19 nt, synthetic construct
  source 1..19: mol_type = other RNA
atgcttttgagtaagtgcc

SEQ ID NO: 3115 - RNA, 19 nt, synthetic construct
  source 1..19: mol_type = other RNA
gatgcttttgagtaagtgc

SEQ ID NO: 3116 - RNA, 19 nt, synthetic construct
  source 1..19: mol_type = other RNA
agatgcttttgagtaagtg

SEQ ID NO: 3117 - RNA, 19 nt, synthetic construct
  source 1..19: mol_type = other RNA
tagatgcttttgagtaagt

SEQ ID NO: 3118 - RNA, 19 nt, synthetic construct
  source 1..19: mol_type = other RNA
gtagatgcttttgagtaag

SEQ ID NO: 3119 - RNA, 19 nt, synthetic construct
  source 1..19: mol_type = other RNA
agtagatgcttttgagtaa

SEQ ID NO: 3120 - RNA, 19 nt, synthetic construct
  source 1..19: mol_type = other RNA
gagtagatgcttttgagta

SEQ ID NO: 3121 - RNA, 19 nt, synthetic construct
  source 1..19: mol_type = other RNA
ggagtagatgcttttgagt

SEQ ID NO: 3122 - RNA, 19 nt, synthetic construct
  source 1..19: mol_type = other RNA
aggagtagatgcttttgag

SEQ ID NO: 3123 - RNA, 19 nt, synthetic construct
  source 1..19: mol_type = other RNA
taggagtagatgcttttga

SEQ ID NO: 3124 - RNA, 19 nt, synthetic construct
  source 1..19: mol_type = other RNA
ttaggagtagatgcttttg

SEQ ID NO: 3125 - RNA, 19 nt, synthetic construct
  source 1..19: mol_type = other RNA
attaggagtagatgctttt

SEQ ID NO: 3126 - RNA, 19 nt, synthetic construct
  source 1..19: mol_type = other RNA
cattaggagtagatgcttt

SEQ ID NO: 3127 - RNA, 19 nt, synthetic construct
  source 1..19: mol_type = other RNA
ccattaggagtagatgctt

SEQ ID NO: 3128 - RNA, 19 nt, synthetic construct
  source 1..19: mol_type = other RNA
accattaggagtagatgct

SEQ ID NO: 3129 - RNA, 19 nt, synthetic construct
  source 1..19: mol_type = other RNA
aaccattaggagtagatgc

SEQ ID NO: 3130 - RNA, 19 nt, synthetic construct
  source 1..19: mol_type = other RNA
taaccattaggagtagatg

SEQ ID NO: 3131 - RNA, 19 nt, synthetic construct
  source 1..19: mol_type = other RNA
ataaccattaggagtagat

SEQ ID NO: 3132 - RNA, 19 nt, synthetic construct
  source 1..19: mol_type = other RNA
cataaccattaggagtaga

SEQ ID NO: 3133 - RNA, 19 nt, synthetic construct
  source 1..19: mol_type = other RNA
tcataaccattaggagtag

SEQ ID NO: 3134 - RNA, 19 nt, synthetic construct
  source 1..19: mol_type = other RNA
atcataaccattaggagta

SEQ ID NO: 3135 - RNA, 19 nt, synthetic construct
  source 1..19: mol_type = other RNA
tatcataaccattaggagt

SEQ ID NO: 3136 - RNA, 19 nt, synthetic construct
  source 1..19: mol_type = other RNA
ttatcataaccattaggag

SEQ ID NO: 3137 - RNA, 19 nt, synthetic construct
  source 1..19: mol_type = other RNA
attatcataaccattagga

SEQ ID NO: 3138 - RNA, 19 nt, synthetic construct
  source 1..19: mol_type = other RNA
cattatcataaccattagg

SEQ ID NO: 3139 - RNA, 19 nt, synthetic construct
  source 1..19: mol_type = other RNA
ccattatcataaccattag

SEQ ID NO: 3140 - RNA, 19 nt, synthetic construct
  source 1..19: mol_type = other RNA
gccattatcataaccatta

SEQ ID NO: 3141 - RNA, 19 nt, synthetic construct
  source 1..19: mol_type = other RNA
tgccattatcataaccatt

SEQ ID NO: 3142 - RNA, 19 nt, synthetic construct
  source 1..19: mol_type = other RNA
atgccattatcataaccat

SEQ ID NO: 3143 - RNA, 19 nt, synthetic construct
  source 1..19: mol_type = other RNA
aatgccattatcataacca

SEQ ID NO: 3144 - RNA, 19 nt, synthetic construct
  source 1..19: mol_type = other RNA
taatgccattatcataacc

SEQ ID NO: 3145 - RNA, 19 nt, synthetic construct
  source 1..19: mol_type = other RNA
ataatgccattatcataac

SEQ ID NO: 3146 - RNA, 19 nt, synthetic construct
  source 1..19: mol_type = other RNA
aataatgccattatcataa

SEQ ID NO: 3147 - RNA, 19 nt, synthetic construct
  source 1..19: mol_type = other RNA
aaataatgccattatcata

SEQ ID NO: 3148 - RNA, 19 nt, synthetic construct
  source 1..19: mol_type = other RNA
caaataatgccattatcat

SEQ ID NO: 3149 - RNA, 19 nt, synthetic construct
  source 1..19: mol_type = other RNA
ccaaataatgccattatca

SEQ ID NO: 3150 - RNA, 19 nt, synthetic construct
  source 1..19: mol_type = other RNA
cccaaataatgccattatc

SEQ ID NO: 3151 - RNA, 19 nt, synthetic construct
  source 1..19: mol_type = other RNA
gcccaaataatgccattat

SEQ ID NO: 3152 - RNA, 19 nt, synthetic construct
  source 1..19: mol_type = other RNA
ggcccaaataatgccatta

SEQ ID NO: 3153 - RNA, 19 nt, synthetic construct
  source 1..19: mol_type = other RNA
tggcccaaataatgccatt

SEQ ID NO: 3154 - RNA, 19 nt, synthetic construct
  source 1..19: mol_type = other RNA
gtggcccaaataatgccat

SEQ ID NO: 3155 - RNA, 19 nt, synthetic construct
  source 1..19: mol_type = other RNA
agtggcccaaataatgcca

SEQ ID NO: 3156 - RNA, 19 nt, synthetic construct
  source 1..19: mol_type = other RNA
aagtggcccaaataatgcc

SEQ ID NO: 3157 - RNA, 19 nt, synthetic construct
  source 1..19: mol_type = other RNA
caagtggcccaaataatgc

SEQ ID NO: 3158 - RNA, 19 nt, synthetic construct
  source 1..19: mol_type = other RNA
ccaagtggcccaaataatg

SEQ ID NO: 3159 - RNA, 19 nt, synthetic construct
  source 1..19: mol_type = other RNA
tccaagtggcccaaataat

SEQ ID NO: 3160 - RNA, 19 nt, synthetic construct
  source 1..19: mol_type = other RNA
ttccaagtggcccaaataa

SEQ ID NO: 3161 - RNA, 19 nt, synthetic construct
  source 1..19: mol_type = other RNA
tttccaagtggcccaaata

SEQ ID NO: 3162 - RNA, 19 nt, synthetic construct
  source 1..19: mol_type = other RNA
ttttccaagtggcccaaat

SEQ ID NO: 3163 - RNA, 19 nt, synthetic construct
  source 1..19: mol_type = other RNA
gttttccaagtggcccaaa

SEQ ID NO: 3164 - RNA, 19 nt, synthetic construct
  source 1..19: mol_type = other RNA
ggttttccaagtggcccaa

SEQ ID NO: 3165 - RNA, 19 nt, synthetic construct
  source 1..19: mol_type = other RNA
gggttttccaagtggccca

SEQ ID NO: 3166 - RNA, 19 nt, synthetic construct
  source 1..19: mol_type = other RNA
cgggttttccaagtggccc

SEQ ID NO: 3167 - RNA, 19 nt, synthetic construct
  source 1..19: mol_type = other RNA
ccgggttttccaagtggcc

SEQ ID NO: 3168 - RNA, 19 nt, synthetic construct
  source 1..19: mol_type = other RNA
accgggttttccaagtggc

SEQ ID NO: 3169 - RNA, 19 nt, synthetic construct
  source 1..19: mol_type = other RNA
caccgggttttccaagtgg

SEQ ID NO: 3170 - RNA, 19 nt, synthetic construct
  source 1..19: mol_type = other RNA
ccaccgggttttccaagtg

SEQ ID NO: 3171 - RNA, 19 nt, synthetic construct
  source 1..19: mol_type = other RNA
accaccgggttttccaagt

SEQ ID NO: 3172 - RNA, 19 nt, synthetic construct
  source 1..19: mol_type = other RNA
taccaccgggttttccaag

SEQ ID NO: 3173 - RNA, 19 nt, synthetic construct
  source 1..19: mol_type = other RNA
ataccaccgggttttccaa

SEQ ID NO: 3174 - RNA, 19 nt, synthetic construct
  source 1..19: mol_type = other RNA
aataccaccgggttttcca

SEQ ID NO: 3175 - RNA, 19 nt, synthetic construct
  source 1..19: mol_type = other RNA
gaataccaccgggttttcc

SEQ ID NO: 3176 - RNA, 19 nt, synthetic construct
  source 1..19: mol_type = other RNA
ggaataccaccgggttttc

SEQ ID NO: 3177 - RNA, 19 nt, synthetic construct
  source 1..19: mol_type = other RNA
tggaataccaccgggtttt

SEQ ID NO: 3178 - RNA, 19 nt, synthetic construct
  source 1..19: mol_type = other RNA
atggaataccaccgggttt

SEQ ID NO: 3179 - RNA, 19 nt, synthetic construct
  source 1..19: mol_type = other RNA
catggaataccaccgggtt

SEQ ID NO: 3180 - RNA, 19 nt, synthetic construct
  source 1..19: mol_type = other RNA
tcatggaataccaccgggt

SEQ ID NO: 3181 - RNA, 19 nt, synthetic construct
  source 1..19: mol_type = other RNA
ttcatggaataccaccggg

SEQ ID NO: 3182 - RNA, 19 nt, synthetic construct
  source 1..19: mol_type = other RNA
cttcatggaataccaccgg

SEQ ID NO: 3183 - RNA, 19 nt, synthetic construct
  source 1..19: mol_type = other RNA
tcttcatggaataccaccg

SEQ ID NO: 3184 - RNA, 19 nt, synthetic construct
  source 1..19: mol_type = other RNA
ttcttcatggaataccacc

SEQ ID NO: 3185 - RNA, 19 nt, synthetic construct
  source 1..19: mol_type = other RNA
tttcttcatggaataccac

SEQ ID NO: 3186 - RNA, 19 nt, synthetic construct
  source 1..19: mol_type = other RNA
ttttcttcatggaatacca

SEQ ID NO: 3187 - RNA, 19 nt, synthetic construct
  source 1..19: mol_type = other RNA
gttttcttcatggaatacc

SEQ ID NO: 3188 - RNA, 19 nt, synthetic construct
  source 1..19: mol_type = other RNA
ggttttcttcatggaatac

SEQ ID NO: 3189 - RNA, 19 nt, synthetic construct
  source 1..19: mol_type = other RNA
tggttttcttcatggaata

SEQ ID NO: 3190 - RNA, 19 nt, synthetic construct
  source 1..19: mol_type = other RNA
gtggttttcttcatggaat

SEQ ID NO: 3191 - RNA, 19 nt, synthetic construct
  source 1..19: mol_type = other RNA
agtggttttcttcatggaa

SEQ ID NO: 3192 - RNA, 19 nt, synthetic construct
  source 1..19: mol_type = other RNA
tagtggttttcttcatgga

SEQ ID NO: 3193 - RNA, 19 nt, synthetic construct
  source 1..19: mol_type = other RNA
atagtggttttcttcatgg

SEQ ID NO: 3194 - RNA, 19 nt, synthetic construct
  source 1..19: mol_type = other RNA
catagtggttttcttcatg

SEQ ID NO: 3195 - RNA, 19 nt, synthetic construct
  source 1..19: mol_type = other RNA
tcatagtggttttcttcat

SEQ ID NO: 3196 - RNA, 19 nt, synthetic construct
  source 1..19: mol_type = other RNA
ttcatagtggttttcttca

SEQ ID NO: 3197 - RNA, 19 nt, synthetic construct
  source 1..19: mol_type = other RNA
cttcatagtggttttcttc

SEQ ID NO: 3198 - RNA, 19 nt, synthetic construct
  source 1..19: mol_type = other RNA
tcttcatagtggttttctt

SEQ ID NO: 3199 - RNA, 19 nt, synthetic construct
  source 1..19: mol_type = other RNA
atcttcatagtggttttct

SEQ ID NO: 3200 - RNA, 19 nt, synthetic construct
  source 1..19: mol_type = other RNA
tatcttcatagtggttttc

SEQ ID NO: 3201 - RNA, 19 nt, synthetic construct
  source 1..19: mol_type = other RNA
ttatcttcatagtggtttt

SEQ ID NO: 3202 - RNA, 19 nt, synthetic construct
  source 1..19: mol_type = other RNA
attatcttcatagtggttt

SEQ ID NO: 3203 - RNA, 19 nt, synthetic construct
  source 1..19: mol_type = other RNA
gattatcttcatagtggtt

SEQ ID NO: 3204 - RNA, 19 nt, synthetic construct
  source 1..19: mol_type = other RNA
ggattatcttcatagtggt

SEQ ID NO: 3205 - RNA, 19 nt, synthetic construct
  source 1..19: mol_type = other RNA
gggattatcttcatagtgg

SEQ ID NO: 3206 - RNA, 19 nt, synthetic construct
  source 1..19: mol_type = other RNA
tgggattatcttcatagtg

SEQ ID NO: 3207 - RNA, 19 nt, synthetic construct
  source 1..19: mol_type = other RNA
atgggattatcttcatagt

SEQ ID NO: 3208 - RNA, 19 nt, synthetic construct
  source 1..19: mol_type = other RNA
aatgggattatcttcatag

SEQ ID NO: 3209 - RNA, 19 nt, synthetic construct
  source 1..19: mol_type = other RNA
gaatgggattatcttcata

SEQ ID NO: 3210 - RNA, 19 nt, synthetic construct
  source 1..19: mol_type = other RNA
tgaatgggattatcttcat

SEQ ID NO: 3211 - RNA, 19 nt, synthetic construct
  source 1..19: mol_type = other RNA
ttgaatgggattatcttca

SEQ ID NO: 3212 - RNA, 19 nt, synthetic construct
  source 1..19: mol_type = other RNA
gttgaatgggattatcttc

SEQ ID NO: 3213 - RNA, 19 nt, synthetic construct
  source 1..19: mol_type = other RNA
tgttgaatgggattatctt

SEQ ID NO: 3214 - RNA, 19 nt, synthetic construct
  source 1..19: mol_type = other RNA
ctgttgaatgggattatct

SEQ ID NO: 3215 - RNA, 19 nt, synthetic construct
  source 1..19: mol_type = other RNA
tctgttgaatgggattatc

SEQ ID NO: 3216 - RNA, 19 nt, synthetic construct
  source 1..19: mol_type = other RNA
gtctgttgaatgggattat

SEQ ID NO: 3217 - RNA, 19 nt, synthetic construct
  source 1..19: mol_type = other RNA
agtctgttgaatgggatta

SEQ ID NO: 3218 - RNA, 19 nt, synthetic construct
  source 1..19: mol_type = other RNA
gagtctgttgaatgggatt

SEQ ID NO: 3219 - RNA, 19 nt, synthetic construct
  source 1..19: mol_type = other RNA
tgagtctgttgaatgggat

SEQ ID NO: 3220 - RNA, 19 nt, synthetic construct
  source 1..19: mol_type = other RNA
gtgagtctgttgaatggga

SEQ ID NO: 3221 - RNA, 19 nt, synthetic construct
  source 1..19: mol_type = other RNA
tgtgagtctgttgaatggg

SEQ ID NO: 3222 - RNA, 19 nt, synthetic construct
  source 1..19: mol_type = other RNA
ttgtgagtctgttgaatgg

SEQ ID NO: 3223 - RNA, 19 nt, synthetic construct
  source 1..19: mol_type = other RNA
attgtgagtctgttgaatg

SEQ ID NO: 3224 - RNA, 19 nt, synthetic construct
  source 1..19: mol_type = other RNA
aattgtgagtctgttgaat

SEQ ID NO: 3225 - RNA, 19 nt, synthetic construct
  source 1..19: mol_type = other RNA
caattgtgagtctgttgaa

SEQ ID NO: 3226 - RNA, 19 nt, synthetic construct
  source 1..19: mol_type = other RNA
ccaattgtgagtctgttga

SEQ ID NO: 3227 - RNA, 19 nt, synthetic construct
  source 1..19: mol_type = other RNA
tccaattgtgagtctgttg

SEQ ID NO: 3228 - RNA, 19 nt, synthetic construct
  source 1..19: mol_type = other RNA
ctccaattgtgagtctgtt

SEQ ID NO: 3229 - RNA, 19 nt, synthetic construct
  source 1..19: mol_type = other RNA
tctccaattgtgagtctgt

SEQ ID NO: 3230 - RNA, 19 nt, synthetic construct
  source 1..19: mol_type = other RNA
ttctccaattgtgagtctg

SEQ ID NO: 3231 - RNA, 19 nt, synthetic construct
  source 1..19: mol_type = other RNA
cttctccaattgtgagtct

SEQ ID NO: 3232 - RNA, 19 nt, synthetic construct
  source 1..19: mol_type = other RNA
ccttctccaattgtgagtc

SEQ ID NO: 3233 - RNA, 19 nt, synthetic construct
  source 1..19: mol_type = other RNA
tccttctccaattgtgagt

SEQ ID NO: 3234 - RNA, 19 nt, synthetic construct
  source 1..19: mol_type = other RNA
gtccttctccaattgtgag

SEQ ID NO: 3235 - RNA, 19 nt, synthetic construct
  source 1..19: mol_type = other RNA
tgtccttctccaattgtga

SEQ ID NO: 3236 - RNA, 19 nt, synthetic construct
  source 1..19: mol_type = other RNA
ctgtccttctccaattgtg

SEQ ID NO: 3237 - RNA, 19 nt, synthetic construct
  source 1..19: mol_type = other RNA
gctgtccttctccaattgt

SEQ ID NO: 3238 - RNA, 19 nt, synthetic construct
  source 1..19: mol_type = other RNA
tgctgtccttctccaattg

SEQ ID NO: 3239 - RNA, 19 nt, synthetic construct
  source 1..19: mol_type = other RNA
ttgctgtccttctccaatt

SEQ ID NO: 3240 - RNA, 19 nt, synthetic construct
  source 1..19: mol_type = other RNA
gttgctgtccttctccaat

SEQ ID NO: 3241 - RNA, 19 nt, synthetic construct
  source 1..19: mol_type = other RNA
tgttgctgtccttctccaa

SEQ ID NO: 3242 - RNA, 19 nt, synthetic construct
  source 1..19: mol_type = other RNA
gtgttgctgtccttctcca

SEQ ID NO: 3243 - RNA, 19 nt, synthetic construct
  source 1..19: mol_type = other RNA
ggtgttgctgtccttctcc

SEQ ID NO: 3244 - RNA, 19 nt, synthetic construct
  source 1..19: mol_type = other RNA
tggtgttgctgtccttctc

SEQ ID NO: 3245 - RNA, 19 nt, synthetic construct
  source 1..19: mol_type = other RNA
gtggtgttgctgtccttct

SEQ ID NO: 3246 - RNA, 19 nt, synthetic construct
  source 1..19: mol_type = other RNA
ggtggtgttgctgtccttc

SEQ ID NO: 3247 - RNA, 19 nt, synthetic construct
  source 1..19: mol_type = other RNA
aggtggtgttgctgtcctt

SEQ ID NO: 3248 - RNA, 19 nt, synthetic construct
  source 1..19: mol_type = other RNA
caggtggtgttgctgtcct

SEQ ID NO: 3249 - RNA, 19 nt, synthetic construct
  source 1..19: mol_type = other RNA
ccaggtggtgttgctgtcc

SEQ ID NO: 3250 - RNA, 19 nt, synthetic construct
  source 1..19: mol_type = other RNA
cccaggtggtgttgctgtc

SEQ ID NO: 3251 - RNA, 19 nt, synthetic construct
  source 1..19: mol_type = other RNA
ccccaggtggtgttgctgt

SEQ ID NO: 3252 - RNA, 19 nt, synthetic construct
  source 1..19: mol_type = other RNA
cccccaggtggtgttgctg

SEQ ID NO: 3253 - RNA, 19 nt, synthetic construct
  source 1..19: mol_type = other RNA
ccccccaggtggtgttgct

SEQ ID NO: 3254 - RNA, 19 nt, synthetic construct
  source 1..19: mol_type = other RNA
tccccccaggtggtgttgc

SEQ ID NO: 3255 - RNA, 19 nt, synthetic construct
  source 1..19: mol_type = other RNA
ctccccccaggtggtgttg

SEQ ID NO: 3256 - RNA, 19 nt, synthetic construct
  source 1..19: mol_type = other RNA
gctccccccaggtggtgtt

SEQ ID NO: 3257 - RNA, 19 nt, synthetic construct
  source 1..19: mol_type = other RNA
ggctccccccaggtggtgt

SEQ ID NO: 3258 - RNA, 19 nt, synthetic construct
  source 1..19: mol_type = other RNA
tggctccccccaggtggtg

SEQ ID NO: 3259 - RNA, 19 nt, synthetic construct
  source 1..19: mol_type = other RNA
ttggctccccccaggtggt

SEQ ID NO: 3260 - RNA, 19 nt, synthetic construct
  source 1..19: mol_type = other RNA
tttggctccccccaggtgg

SEQ ID NO: 3261 - RNA, 19 nt, synthetic construct
  source 1..19: mol_type = other RNA
gtttggctccccccaggtg

SEQ ID NO: 3262 - RNA, 19 nt, synthetic construct
  source 1..19: mol_type = other RNA
tgtttggctccccccaggt

SEQ ID NO: 3263 - RNA, 19 nt, synthetic construct
  source 1..19: mol_type = other RNA
ctgtttggctccccccagg

SEQ ID NO: 3264 - RNA, 19 nt, synthetic construct
  source 1..19: mol_type = other RNA
cctgtttggctccccccag

SEQ ID NO: 3265 - RNA, 19 nt, synthetic construct
  source 1..19: mol_type = other RNA
gcctgtttggctcccccca

SEQ ID NO: 3266 - RNA, 19 nt, synthetic construct
  source 1..19: mol_type = other RNA
agcctgtttggctcccccc

SEQ ID NO: 3267 - RNA, 19 nt, synthetic construct
  source 1..19: mol_type = other RNA
cagcctgtttggctccccc

SEQ ID NO: 3268 - RNA, 19 nt, synthetic construct
  source 1..19: mol_type = other RNA
ccagcctgtttggctcccc

SEQ ID NO: 3269 - RNA, 19 nt, synthetic construct
  source 1..19: mol_type = other RNA
tccagcctgtttggctccc

SEQ ID NO: 3270 - RNA, 19 nt, synthetic construct
  source 1..19: mol_type = other RNA
ctccagcctgtttggctcc

SEQ ID NO: 3271 - RNA, 19 nt, synthetic construct
  source 1..19: mol_type = other RNA
tctccagcctgtttggctc

SEQ ID NO: 3272 - RNA, 19 nt, synthetic construct
  source 1..19: mol_type = other RNA
gtctccagcctgtttggct

SEQ ID NO: 3273 - RNA, 19 nt, synthetic construct
  source 1..19: mol_type = other RNA
cgtctccagcctgtttggc

SEQ ID NO: 3274 - RNA, 19 nt, synthetic construct
  source 1..19: mol_type = other RNA
acgtctccagcctgtttgg

SEQ ID NO: 3275 - RNA, 19 nt, synthetic construct
  source 1..19: mol_type = other RNA
aacgtctccagcctgtttg

SEQ ID NO: 3276 - RNA, 19 nt, synthetic construct
  source 1..19: mol_type = other RNA
aaacgtctccagcctgttt

SEQ ID NO: 3277 - RNA, 19 nt, synthetic construct
  source 1..19: mol_type = other RNA
taaacgtctccagcctgtt

SEQ ID NO: 3278 - RNA, 19 nt, synthetic construct
  source 1..19: mol_type = other RNA
ttaaacgtctccagcctgt

SEQ ID NO: 3279 - RNA, 19 nt, synthetic construct
  source 1..19: mol_type = other RNA
tttaaacgtctccagcctg

SEQ ID NO: 3280 - RNA, 19 nt, synthetic construct
  source 1..19: mol_type = other RNA
ttttaaacgtctccagcct

SEQ ID NO: 3281 - RNA, 19 nt, synthetic construct
  source 1..19: mol_type = other RNA
cttttaaacgtctccagcc

SEQ ID NO: 3282 - RNA, 19 nt, synthetic construct
  source 1..19: mol_type = other RNA
tcttttaaacgtctccagc

SEQ ID NO: 3283 - RNA, 19 nt, synthetic construct
  source 1..19: mol_type = other RNA
gtcttttaaacgtctccag

SEQ ID NO: 3284 - RNA, 19 nt, synthetic construct
  source 1..19: mol_type = other RNA
ggtcttttaaacgtctcca

SEQ ID NO: 3285 - RNA, 19 nt, synthetic construct
  source 1..19: mol_type = other RNA
cggtcttttaaacgtctcc

SEQ ID NO: 3286 - RNA, 19 nt, synthetic construct
  source 1..19: mol_type = other RNA
acggtcttttaaacgtctc

SEQ ID NO: 3287 - RNA, 19 nt, synthetic construct
  source 1..19: mol_type = other RNA
aacggtcttttaaacgtct

SEQ ID NO: 3288 - RNA, 19 nt, synthetic construct
  source 1..19: mol_type = other RNA
aaacggtcttttaaacgtc

SEQ ID NO: 3289 - RNA, 19 nt, synthetic construct
  source 1..19: mol_type = other RNA
gaaacggtcttttaaacgt

SEQ ID NO: 3290 - RNA, 19 nt, synthetic construct
  source 1..19: mol_type = other RNA
tgaaacggtcttttaaacg

SEQ ID NO: 3291 - RNA, 19 nt, synthetic construct
  source 1..19: mol_type = other RNA
ttgaaacggtcttttaaac

SEQ ID NO: 3292 - RNA, 19 nt, synthetic construct
  source 1..19: mol_type = other RNA
tttgaaacggtcttttaaa

SEQ ID NO: 3293 - RNA, 19 nt, synthetic construct
  source 1..19: mol_type = other RNA
ttttgaaacggtcttttaa

SEQ ID NO: 3294 - RNA, 19 nt, synthetic construct
  source 1..19: mol_type = other RNA
cttttgaaacggtctttta

SEQ ID NO: 3295 - RNA, 19 nt, synthetic construct
  source 1..19: mol_type = other RNA
tcttttgaaacggtctttt

SEQ ID NO: 3296 - RNA, 19 nt, synthetic construct
  source 1..19: mol_type = other RNA
ctcttttgaaacggtcttt

SEQ ID NO: 3297 - RNA, 19 nt, synthetic construct
  source 1..19: mol_type = other RNA
tctcttttgaaacggtctt

SEQ ID NO: 3298 - RNA, 19 nt, synthetic construct
  source 1..19: mol_type = other RNA
atctcttttgaaacggtct

SEQ ID NO: 3299 - RNA, 19 nt, synthetic construct
  source 1..19: mol_type = other RNA
aatctcttttgaaacggtc

SEQ ID NO: 3300 - RNA, 19 nt, synthetic construct
  source 1..19: mol_type = other RNA
aaatctcttttgaaacggt

SEQ ID NO: 3301 - RNA, 19 nt, synthetic construct
  source 1..19: mol_type = other RNA
taaatctcttttgaaacgg

SEQ ID NO: 3302 - RNA, 19 nt, synthetic construct
  source 1..19: mol_type = other RNA
gtaaatctcttttgaaacg

SEQ ID NO: 3303 - RNA, 19 nt, synthetic construct
  source 1..19: mol_type = other RNA
agtaaatctcttttgaaac

SEQ ID NO: 3304 - RNA, 19 nt, synthetic construct
  source 1..19: mol_type = other RNA
aagtaaatctcttttgaaa

SEQ ID NO: 3305 - RNA, 19 nt, synthetic construct
  source 1..19: mol_type = other RNA
aaagtaaatctcttttgaa

SEQ ID NO: 3306 - RNA, 19 nt, synthetic construct
  source 1..19: mol_type = other RNA
aaaagtaaatctcttttga

SEQ ID NO: 3307 - RNA, 19 nt, synthetic construct
  source 1..19: mol_type = other RNA
aaaaagtaaatctcttttg

SEQ ID NO: 3308 - RNA, 19 nt, synthetic construct
  source 1..19: mol_type = other RNA
aaaaaagtaaatctctttt

SEQ ID NO: 3309 - RNA, 19 nt, synthetic construct
  source 1..19: mol_type = other RNA
taaaaaagtaaatctcttt

SEQ ID NO: 3310 - RNA, 19 nt, synthetic construct
  source 1..19: mol_type = other RNA
ttaaaaaagtaaatctctt

SEQ ID NO: 3311 - RNA, 19 nt, synthetic construct
  source 1..19: mol_type = other RNA
tttaaaaaagtaaatctct

SEQ ID NO: 3312 - RNA, 19 nt, synthetic construct
  source 1..19: mol_type = other RNA
ctttaaaaaagtaaatctc

SEQ ID NO: 3313 - RNA, 19 nt, synthetic construct
  source 1..19: mol_type = other RNA
cctttaaaaaagtaaatct

SEQ ID NO: 3314 - RNA, 19 nt, synthetic construct
  source 1..19: mol_type = other RNA
tcctttaaaaaagtaaatc

SEQ ID NO: 3315 - RNA, 19 nt, synthetic construct
  source 1..19: mol_type = other RNA
gtcctttaaaaaagtaaat

SEQ ID NO: 3316 - RNA, 19 nt, synthetic construct
  source 1..19: mol_type = other RNA
agtcctttaaaaaagtaaa

SEQ ID NO: 3317 - RNA, 19 nt, synthetic construct
  source 1..19: mol_type = other RNA
aagtcctttaaaaaagtaa

SEQ ID NO: 3318 - RNA, 19 nt, synthetic construct
  source 1..19: mol_type = other RNA
aaagtcctttaaaaaagta

SEQ ID NO: 3319 - RNA, 19 nt, synthetic construct
  source 1..19: mol_type = other RNA
taaagtcctttaaaaaagt

SEQ ID NO: 3320 - RNA, 19 nt, synthetic construct
  source 1..19: mol_type = other RNA
ataaagtcctttaaaaaag

SEQ ID NO: 3321 - RNA, 19 nt, synthetic construct
  source 1..19: mol_type = other RNA
gataaagtcctttaaaaaa

SEQ ID NO: 3322 - RNA, 19 nt, synthetic construct
  source 1..19: mol_type = other RNA
agataaagtcctttaaaaa

SEQ ID NO: 3323 - RNA, 19 nt, synthetic construct
  source 1..19: mol_type = other RNA
cagataaagtcctttaaaa

SEQ ID NO: 3324 - RNA, 19 nt, synthetic construct
  source 1..19: mol_type = other RNA
tcagataaagtcctttaaa

SEQ ID NO: 3325 - RNA, 19 nt, synthetic construct
  source 1..19: mol_type = other RNA
ttcagataaagtcctttaa

SEQ ID NO: 3326 - RNA, 19 nt, synthetic construct
  source 1..19: mol_type = other RNA
gttcagataaagtccttta

SEQ ID NO: 3327 - RNA, 19 nt, synthetic construct
  source 1..19: mol_type = other RNA
tgttcagataaagtccttt

SEQ ID NO: 3328 - RNA, 19 nt, synthetic construct
  source 1..19: mol_type = other RNA
ctgttcagataaagtcctt

SEQ ID NO: 3329 - RNA, 19 nt, synthetic construct
  source 1..19: mol_type = other RNA
tctgttcagataaagtcct

SEQ ID NO: 3330 - RNA, 19 nt, synthetic construct
  source 1..19: mol_type = other RNA
ctctgttcagataaagtcc

SEQ ID NO: 3331 - RNA, 19 nt, synthetic construct
  source 1..19: mol_type = other RNA
tctctgttcagataaagtc

SEQ ID NO: 3332 - RNA, 19 nt, synthetic construct
  source 1..19: mol_type = other RNA
ctctctgttcagataaagt

SEQ ID NO: 3333 - RNA, 19 nt, synthetic construct
  source 1..19: mol_type = other RNA
tctctctgttcagataaag

SEQ ID NO: 3334 - RNA, 19 nt, synthetic construct
  source 1..19: mol_type = other RNA
atctctctgttcagataaa

SEQ ID NO: 3335 - RNA, 19 nt, synthetic construct
  source 1..19: mol_type = other RNA
tatctctctgttcagataa

SEQ ID NO: 3336 - RNA, 19 nt, synthetic construct
  source 1..19: mol_type = other RNA
atatctctctgttcagata

SEQ ID NO: 3337 - RNA, 19 nt, synthetic construct
  source 1..19: mol_type = other RNA
tatatctctctgttcagat

SEQ ID NO: 3338 - RNA, 19 nt, synthetic construct
  source 1..19: mol_type = other RNA
ttatatctctctgttcaga

SEQ ID NO: 3339 - RNA, 19 nt, synthetic construct
  source 1..19: mol_type = other RNA
attatatctctctgttcag

SEQ ID NO: 3340 - RNA, 19 nt, synthetic construct
  source 1..19: mol_type = other RNA
tattatatctctctgttca

SEQ ID NO: 3341 - RNA, 19 nt, synthetic construct
  source 1..19: mol_type = other RNA
atattatatctctctgttc

SEQ ID NO: 3342 - RNA, 19 nt, synthetic construct
  source 1..19: mol_type = other RNA
aatattatatctctctgtt

SEQ ID NO: 3343 - RNA, 19 nt, synthetic construct
  source 1..19: mol_type = other RNA
aaatattatatctctctgt

SEQ ID NO: 3344 - RNA, 19 nt, synthetic construct
  source 1..19: mol_type = other RNA
aaaatattatatctctctg

SEQ ID NO: 3345 - RNA, 19 nt, synthetic construct
  source 1..19: mol_type = other RNA
aaaaatattatatctctct

SEQ ID NO: 3346 - RNA, 19 nt, synthetic construct
  source 1..19: mol_type = other RNA
gaaaaatattatatctctc

SEQ ID NO: 3347 - RNA, 19 nt, synthetic construct
  source 1..19: mol_type = other RNA
ggaaaaatattatatctct

SEQ ID NO: 3348 - RNA, 19 nt, synthetic construct
  source 1..19: mol_type = other RNA
aggaaaaatattatatctc

SEQ ID NO: 3349 - RNA, 19 nt, synthetic construct
  source 1..19: mol_type = other RNA
taggaaaaatattatatct

SEQ ID NO: 3350 - RNA, 19 nt, synthetic construct
  source 1..19: mol_type = other RNA
ataggaaaaatattatatc

SEQ ID NO: 3351 - RNA, 19 nt, synthetic construct
  source 1..19: mol_type = other RNA
aataggaaaaatattatat

SEQ ID NO: 3352 - RNA, 19 nt, synthetic construct
  source 1..19: mol_type = other RNA
caataggaaaaatattata

SEQ ID NO: 3353 - RNA, 19 nt, synthetic construct
  source 1..19: mol_type = other RNA
ccaataggaaaaatattat

SEQ ID NO: 3354 - RNA, 19 nt, synthetic construct
  source 1..19: mol_type = other RNA
tccaataggaaaaatatta

SEQ ID NO: 3355 - RNA, 19 nt, synthetic construct
  source 1..19: mol_type = other RNA
gtccaataggaaaaatatt

SEQ ID NO: 3356 - RNA, 19 nt, synthetic construct
  source 1..19: mol_type = other RNA
tgtccaataggaaaaatat

SEQ ID NO: 3357 - RNA, 19 nt, synthetic construct
  source 1..19: mol_type = other RNA
ttgtccaataggaaaaata

SEQ ID NO: 3358 - RNA, 19 nt, synthetic construct
  source 1..19: mol_type = other RNA
attgtccaataggaaaaat

SEQ ID NO: 3359 - RNA, 19 nt, synthetic construct
  source 1..19: mol_type = other RNA
cattgtccaataggaaaaa

SEQ ID NO: 3360 - RNA, 19 nt, synthetic construct
  source 1..19: mol_type = other RNA
ccattgtccaataggaaaa

SEQ ID NO: 3361 - RNA, 19 nt, synthetic construct
  source 1..19: mol_type = other RNA
tccattgtccaataggaaa

SEQ ID NO: 3362 - RNA, 19 nt, synthetic construct
  source 1..19: mol_type = other RNA
gtccattgtccaataggaa

SEQ ID NO: 3363 - RNA, 19 nt, synthetic construct
  source 1..19: mol_type = other RNA
agtccattgtccaatagga

SEQ ID NO: 3364 - RNA, 19 nt, synthetic construct
  source 1..19: mol_type = other RNA
aagtccattgtccaatagg

SEQ ID NO: 3365 - RNA, 19 nt, synthetic construct
  source 1..19: mol_type = other RNA
caagtccattgtccaatag

SEQ ID NO: 3366 - RNA, 19 nt, synthetic construct
  source 1..19: mol_type = other RNA
gcaagtccattgtccaata

SEQ ID NO: 3367 - RNA, 19 nt, synthetic construct
  source 1..19: mol_type = other RNA
tgcaagtccattgtccaat

SEQ ID NO: 3368 - RNA, 19 nt, synthetic construct
  source 1..19: mol_type = other RNA
ttgcaagtccattgtccaa

SEQ ID NO: 3369 - RNA, 19 nt, synthetic construct
  source 1..19: mol_type = other RNA
tttgcaagtccattgtcca

SEQ ID NO: 3370 - RNA, 19 nt, synthetic construct
  source 1..19: mol_type = other RNA
ctttgcaagtccattgtcc

SEQ ID NO: 3371 - RNA, 19 nt, synthetic construct
  source 1..19: mol_type = other RNA
gctttgcaagtccattgtc

SEQ ID NO: 3372 - RNA, 19 nt, synthetic construct
  source 1..19: mol_type = other RNA
agctttgcaagtccattgt

SEQ ID NO: 3373 - RNA, 19 nt, synthetic construct
  source 1..19: mol_type = other RNA
aagctttgcaagtccattg

SEQ ID NO: 3374 - RNA, 19 nt, synthetic construct
  source 1..19: mol_type = other RNA
gaagctttgcaagtccatt

SEQ ID NO: 3375 - RNA, 19 nt, synthetic construct
  source 1..19: mol_type = other RNA
tgaagctttgcaagtccat

SEQ ID NO: 3376 - RNA, 19 nt, synthetic construct
  source 1..19: mol_type = other RNA
gtgaagctttgcaagtcca

SEQ ID NO: 3377 - RNA, 19 nt, synthetic construct
  source 1..19: mol_type = other RNA
agtgaagctttgcaagtcc

SEQ ID NO: 3378 - RNA, 19 nt, synthetic construct
  source 1..19: mol_type = other RNA
aagtgaagctttgcaagtc

SEQ ID NO: 3379 - RNA, 19 nt, synthetic construct
  source 1..19: mol_type = other RNA
gaagtgaagctttgcaagt

SEQ ID NO: 3380 - RNA, 19 nt, synthetic construct
  source 1..19: mol_type = other RNA
tgaagtgaagctttgcaag

SEQ ID NO: 3381 - RNA, 19 nt, synthetic construct
  source 1..19: mol_type = other RNA
atgaagtgaagctttgcaa

SEQ ID NO: 3382 - RNA, 19 nt, synthetic construct
  source 1..19: mol_type = other RNA
aatgaagtgaagctttgca

SEQ ID NO: 3383 - RNA, 19 nt, synthetic construct
  source 1..19: mol_type = other RNA
aaatgaagtgaagctttgc

SEQ ID NO: 3384 - RNA, 19 nt, synthetic construct
  source 1..19: mol_type = other RNA
aaaatgaagtgaagctttg

SEQ ID NO: 3385 - RNA, 19 nt, synthetic construct
  source 1..19: mol_type = other RNA
taaaatgaagtgaagcttt

SEQ ID NO: 3386 - RNA, 19 nt, synthetic construct
  source 1..19: mol_type = other RNA
ttaaaatgaagtgaagctt

SEQ ID NO: 3387 - RNA, 19 nt, synthetic construct
  source 1..19: mol_type = other RNA
cttaaaatgaagtgaagct

SEQ ID NO: 3388 - RNA, 19 nt, synthetic construct
  source 1..19: mol_type = other RNA
tcttaaaatgaagtgaagc

SEQ ID NO: 3389 - RNA, 19 nt, synthetic construct
  source 1..19: mol_type = other RNA
ctcttaaaatgaagtgaag

SEQ ID NO: 3390 - RNA, 19 nt, synthetic construct
  source 1..19: mol_type = other RNA
gctcttaaaatgaagtgaa

SEQ ID NO: 3391 - RNA, 19 nt, synthetic construct
  source 1..19: mol_type = other RNA
tgctcttaaaatgaagtga

SEQ ID NO: 3392 - RNA, 19 nt, synthetic construct
  source 1..19: mol_type = other RNA
ttgctcttaaaatgaagtg

SEQ ID NO: 3393 - RNA, 19 nt, synthetic construct
  source 1..19: mol_type = other RNA
tttgctcttaaaatgaagt

SEQ ID NO: 3394 - RNA, 19 nt, synthetic construct
  source 1..19: mol_type = other RNA
ttttgctcttaaaatgaag

SEQ ID NO: 3395 - RNA, 19 nt, synthetic construct
  source 1..19: mol_type = other RNA
cttttgctcttaaaatgaa

SEQ ID NO: 3396 - RNA, 19 nt, synthetic construct
  source 1..19: mol_type = other RNA
tcttttgctcttaaaatga

SEQ ID NO: 3397 - RNA, 19 nt, synthetic construct
  source 1..19: mol_type = other RNA
gtcttttgctcttaaaatg

SEQ ID NO: 3398 - RNA, 19 nt, synthetic construct
  source 1..19: mol_type = other RNA
ggtcttttgctcttaaaat

SEQ ID NO: 3399 - RNA, 19 nt, synthetic construct
  source 1..19: mol_type = other RNA
gggtcttttgctcttaaaa

SEQ ID NO: 3400 - RNA, 19 nt, synthetic construct
  source 1..19: mol_type = other RNA
ggggtcttttgctcttaaa

SEQ ID NO: 3401 - RNA, 19 nt, synthetic construct
  source 1..19: mol_type = other RNA
tggggtcttttgctcttaa

SEQ ID NO: 3402 - RNA, 19 nt, synthetic construct
  source 1..19: mol_type = other RNA
atggggtcttttgctctta

SEQ ID NO: 3403 - RNA, 19 nt, synthetic construct
  source 1..19: mol_type = other RNA
catggggtcttttgctctt

SEQ ID NO: 3404 - RNA, 19 nt, synthetic construct
  source 1..19: mol_type = other RNA
acatggggtcttttgctct

SEQ ID NO: 3405 - RNA, 19 nt, synthetic construct
  source 1..19: mol_type = other RNA
aacatggggtcttttgctc

SEQ ID NO: 3406 - RNA, 19 nt, synthetic construct
  source 1..19: mol_type = other RNA
caacatggggtcttttgct

SEQ ID NO: 3407 - RNA, 19 nt, synthetic construct
  source 1..19: mol_type = other RNA
tcaacatggggtcttttgc

SEQ ID NO: 3408 - RNA, 19 nt, synthetic construct
  source 1..19: mol_type = other RNA
ttcaacatggggtcttttg

SEQ ID NO: 3409 - RNA, 19 nt, synthetic construct
  source 1..19: mol_type = other RNA
tttcaacatggggtctttt

SEQ ID NO: 3410 - RNA, 19 nt, synthetic construct
  source 1..19: mol_type = other RNA
ttttcaacatggggtcttt

SEQ ID NO: 3411 - RNA, 19 nt, synthetic construct
  source 1..19: mol_type = other RNA
gttttcaacatggggtctt

SEQ ID NO: 3412 - RNA, 19 nt, synthetic construct
  source 1..19: mol_type = other RNA
agttttcaacatggggtct

SEQ ID NO: 3413 - RNA, 19 nt, synthetic construct
  source 1..19: mol_type = other RNA
gagttttcaacatggggtc

SEQ ID NO: 3414 - RNA, 19 nt, synthetic construct
  source 1..19: mol_type = other RNA
ggagttttcaacatggggt

SEQ ID NO: 3415 - RNA, 19 nt, synthetic construct
  source 1..19: mol_type = other RNA
tggagttttcaacatgggg

SEQ ID NO: 3416 - RNA, 19 nt, synthetic construct
  source 1..19: mol_type = other RNA
atggagttttcaacatggg

SEQ ID NO: 3417 - RNA, 19 nt, synthetic construct
  source 1..19: mol_type = other RNA
tatggagttttcaacatgg

SEQ ID NO: 3418 - RNA, 19 nt, synthetic construct
  source 1..19: mol_type = other RNA
ttatggagttttcaacatg

SEQ ID NO: 3419 - RNA, 19 nt, synthetic construct
  source 1..19: mol_type = other RNA
gttatggagttttcaacat

SEQ ID NO: 3420 - RNA, 19 nt, synthetic construct
  source 1..19: mol_type = other RNA
tgttatggagttttcaaca

SEQ ID NO: 3421 - RNA, 19 nt, synthetic construct
  source 1..19: mol_type = other RNA
ctgttatggagttttcaac

SEQ ID NO: 3422 - RNA, 19 nt, synthetic construct
  source 1..19: mol_type = other RNA
actgttatggagttttcaa

SEQ ID NO: 3423 - RNA, 19 nt, synthetic construct
  source 1..19: mol_type = other RNA
aactgttatggagttttca

SEQ ID NO: 3424 - RNA, 19 nt, synthetic construct
  source 1..19: mol_type = other RNA
aaactgttatggagttttc

SEQ ID NO: 3425 - RNA, 19 nt, synthetic construct
  source 1..19: mol_type = other RNA
aaaactgttatggagtttt

SEQ ID NO: 3426 - RNA, 19 nt, synthetic construct
  source 1..19: mol_type = other RNA
taaaactgttatggagttt

SEQ ID NO: 3427 - RNA, 19 nt, synthetic construct
  source 1..19: mol_type = other RNA
ataaaactgttatggagtt

SEQ ID NO: 3428 - RNA, 19 nt, synthetic construct
  source 1..19: mol_type = other RNA
cataaaactgttatggagt

SEQ ID NO: 3429 - RNA, 19 nt, synthetic construct
  source 1..19: mol_type = other RNA
gcataaaactgttatggag

SEQ ID NO: 3430 - RNA, 19 nt, synthetic construct
  source 1..19: mol_type = other RNA
agcataaaactgttatgga

SEQ ID NO: 3431 - RNA, 19 nt, synthetic construct
  source 1..19: mol_type = other RNA
cagcataaaactgttatgg

SEQ ID NO: 3432 - RNA, 19 nt, synthetic construct
  source 1..19: mol_type = other RNA
tcagcataaaactgttatg

SEQ ID NO: 3433 - RNA, 19 nt, synthetic construct
  source 1..19: mol_type = other RNA
atcagcataaaactgttat

SEQ ID NO: 3434 - RNA, 19 nt, synthetic construct
  source 1..19: mol_type = other RNA
catcagcataaaactgtta

SEQ ID NO: 3435 - RNA, 19 nt, synthetic construct
  source 1..19: mol_type = other RNA
tcatcagcataaaactgtt

SEQ ID NO: 3436 - RNA, 19 nt, synthetic construct
  source 1..19: mol_type = other RNA
atcatcagcataaaactgt

SEQ ID NO: 3437 - RNA, 19 nt, synthetic construct
  source 1..19: mol_type = other RNA
tatcatcagcataaaactg

SEQ ID NO: 3438 - RNA, 19 nt, synthetic construct
  source 1..19: mol_type = other RNA
ttatcatcagcataaaact

SEQ ID NO: 3439 - RNA, 19 nt, synthetic construct
  source 1..19: mol_type = other RNA
attatcatcagcataaaac

SEQ ID NO: 3440 - RNA, 19 nt, synthetic construct
  source 1..19: mol_type = other RNA
aattatcatcagcataaaa

SEQ ID NO: 3441 - RNA, 19 nt, synthetic construct
  source 1..19: mol_type = other RNA
aaattatcatcagcataaa

SEQ ID NO: 3442 - RNA, 19 nt, synthetic construct
  source 1..19: mol_type = other RNA
taaattatcatcagcataa

SEQ ID NO: 3443 - RNA, 19 nt, synthetic construct
  source 1..19: mol_type = other RNA
ataaattatcatcagcata

SEQ ID NO: 3444 - RNA, 19 nt, synthetic construct
  source 1..19: mol_type = other RNA
gataaattatcatcagcat

SEQ ID NO: 3445 - RNA, 19 nt, synthetic construct
  source 1..19: mol_type = other RNA
agataaattatcatcagca

SEQ ID NO: 3446 - RNA, 19 nt, synthetic construct
  source 1..19: mol_type = other RNA
tagataaattatcatcagc

SEQ ID NO: 3447 - RNA, 19 nt, synthetic construct
  source 1..19: mol_type = other RNA
gtagataaattatcatcag

SEQ ID NO: 3448 - RNA, 19 nt, synthetic construct
  source 1..19: mol_type = other RNA
tgtagataaattatcatca

SEQ ID NO: 3449 - RNA, 19 nt, synthetic construct
  source 1..19: mol_type = other RNA
atgtagataaattatcatc

SEQ ID NO: 3450 - RNA, 19 nt, synthetic construct
  source 1..19: mol_type = other RNA
catgtagataaattatcat

SEQ ID NO: 3451 - RNA, 19 nt, synthetic construct
  source 1..19: mol_type = other RNA
gcatgtagataaattatca

SEQ ID NO: 3452 - RNA, 19 nt, synthetic construct
  source 1..19: mol_type = other RNA
tgcatgtagataaattatc

SEQ ID NO: 3453 - RNA, 19 nt, synthetic construct
  source 1..19: mol_type = other RNA
atgcatgtagataaattat

SEQ ID NO: 3454 - RNA, 19 nt, synthetic construct
  source 1..19: mol_type = other RNA
aatgcatgtagataaatta

SEQ ID NO: 3455 - RNA, 19 nt, synthetic construct
  source 1..19: mol_type = other RNA
aaatgcatgtagataaatt

SEQ ID NO: 3456 - RNA, 19 nt, synthetic construct
  source 1..19: mol_type = other RNA
gaaatgcatgtagataaat

SEQ ID NO: 3457 - RNA, 19 nt, synthetic construct
  source 1..19: mol_type = other RNA
tgaaatgcatgtagataaa

SEQ ID NO: 3458 - RNA, 19 nt, synthetic construct
  source 1..19: mol_type = other RNA
ttgaaatgcatgtagataa

SEQ ID NO: 3459 - RNA, 19 nt, synthetic construct
  source 1..19: mol_type = other RNA
attgaaatgcatgtagata

SEQ ID NO: 3460 - RNA, 19 nt, synthetic construct
  source 1..19: mol_type = other RNA
tattgaaatgcatgtagat

SEQ ID NO: 3461 - RNA, 19 nt, synthetic construct
  source 1..19: mol_type = other RNA
ttattgaaatgcatgtaga

SEQ ID NO: 3462 - RNA, 19 nt, synthetic construct
  source 1..19: mol_type = other RNA
tttattgaaatgcatgtag

SEQ ID NO: 3463 - RNA, 19 nt, synthetic construct
  source 1..19: mol_type = other RNA
gtttattgaaatgcatgta

SEQ ID NO: 3464 - RNA, 19 nt, synthetic construct
  source 1..19: mol_type = other RNA
ggtttattgaaatgcatgt

SEQ ID NO: 3465 - RNA, 19 nt, synthetic construct
  source 1..19: mol_type = other RNA
aggtttattgaaatgcatg

SEQ ID NO: 3466 - RNA, 19 nt, synthetic construct
  source 1..19: mol_type = other RNA
aaggtttattgaaatgcat

SEQ ID NO: 3467 - RNA, 19 nt, synthetic construct
  source 1..19: mol_type = other RNA
aaaggtttattgaaatgca

SEQ ID NO: 3468 - RNA, 19 nt, synthetic construct
  source 1..19: mol_type = other RNA
aaaaggtttattgaaatgc

SEQ ID NO: 3469 - RNA, 19 nt, synthetic construct
  source 1..19: mol_type = other RNA
caaaaggtttattgaaatg

SEQ ID NO: 3470 - RNA, 19 nt, synthetic construct
  source 1..19: mol_type = other RNA
acaaaaggtttattgaaat

SEQ ID NO: 3471 - RNA, 19 nt, synthetic construct
  source 1..19: mol_type = other RNA
aacaaaaggtttattgaaa

SEQ ID NO: 3472 - RNA, 19 nt, synthetic construct
  source 1..19: mol_type = other RNA
aaacaaaaggtttattgaa

SEQ ID NO: 3473 - RNA, 19 nt, synthetic construct
  source 1..19: mol_type = other RNA
gaaacaaaaggtttattga

SEQ ID NO: 3474 - RNA, 19 nt, synthetic construct
  source 1..19: mol_type = other RNA
ggaaacaaaaggtttattg

SEQ ID NO: 3475 - RNA, 19 nt, synthetic construct
  source 1..19: mol_type = other RNA
aggaaacaaaaggtttatt

SEQ ID NO: 3476 - RNA, 19 nt, synthetic construct
  source 1..19: mol_type = other RNA
taggaaacaaaaggtttat

SEQ ID NO: 3477 - RNA, 19 nt, synthetic construct
  source 1..19: mol_type = other RNA
ttaggaaacaaaaggttta

SEQ ID NO: 3478 - RNA, 19 nt, synthetic construct
  source 1..19: mol_type = other RNA
cttaggaaacaaaaggttt

SEQ ID NO: 3479 - RNA, 19 nt, synthetic construct
  source 1..19: mol_type = other RNA
tcttaggaaacaaaaggtt

SEQ ID NO: 3480 - RNA, 19 nt, synthetic construct
  source 1..19: mol_type = other RNA
gtcttaggaaacaaaaggt

SEQ ID NO: 3481 - RNA, 19 nt, synthetic construct
  source 1..19: mol_type = other RNA
agtcttaggaaacaaaagg

SEQ ID NO: 3482 - RNA, 19 nt, synthetic construct
  source 1..19: mol_type = other RNA
tagtcttaggaaacaaaag

SEQ ID NO: 3483 - RNA, 19 nt, synthetic construct
  source 1..19: mol_type = other RNA
ctagtcttaggaaacaaaa

SEQ ID NO: 3484 - RNA, 19 nt, synthetic construct
  source 1..19: mol_type = other RNA
tctagtcttaggaaacaaa

SEQ ID NO: 3485 - RNA, 21 nt, synthetic construct
  source 1..21: mol_type = other RNA
  modified_base 19^20: mod_base = OTHER; note = phosphorothioate linkage
  modified_base 20^21: mod_base = OTHER; note = phosphorothioate linkage
  modified_base 6: mod_base = OTHER; note = 2-fluoro-modified nucleoside
  modified_base 9: mod_base = OTHER; note = 2-fluoro-modified nucleoside
  modified_base 11: mod_base = OTHER; note = 2-fluoro-modified nucleoside
  modified_base 1: mod_base = OTHER; note = 2-O-methyl modified nucleoside
  modified_base 2: mod_base = OTHER; note = 2-O-methyl modified nucleoside
  modified_base 3: mod_base = OTHER; note = 2-O-methyl modified nucleoside
  modified_base 4: mod_base = OTHER; note = 2-O-methyl modified nucleoside
  modified_base 5: mod_base = OTHER; note = 2-O-methyl modified nucleoside
  modified_base 7: mod_base = OTHER; note = 2-O-methyl modified nucleoside
  modified_base 8: mod_base = OTHER; note = 2-O-methyl modified nucleoside
  modified_base 10: mod_base = OTHER; note = 2-O-methyl modified nucleoside
  modified_base 12: mod_base = OTHER; note = 2-O-methyl modified nucleoside
  modified_base 13: mod_base = OTHER; note = 2-O-methyl modified nucleoside
  modified_base 14: mod_base = OTHER; note = 2-O-methyl modified nucleoside
  modified_base 15: mod_base = OTHER; note = 2-O-methyl modified nucleoside
  modified_base 16: mod_base = OTHER; note = 2-O-methyl modified nucleoside
  modified_base 17: mod_base = OTHER; note = 2-O-methyl modified nucleoside
  modified_base 18: mod_base = OTHER; note = 2-O-methyl modified nucleoside
  modified_base 19: mod_base = OTHER; note = 2-O-methyl modified nucleoside
  modified_base 20: mod_base = OTHER; note = 2-O-methyl modified nucleoside
  modified_base 21: mod_base = OTHER; note = 2-O-methyl modified nucleoside
cagacatcatgagttggtatt

SEQ ID NO: 3486 - RNA, 21 nt, synthetic construct
  source 1..21: mol_type = other RNA
  modified_base 19^20: mod_base = OTHER; note = phosphorothioate linkage
  modified_base 20^21: mod_base = OTHER; note = phosphorothioate linkage
  modified_base 7: mod_base = OTHER; note = 2-fluoro-modified nucleoside
  modified_base 9: mod_base = OTHER; note = 2-fluoro-modified nucleoside
  modified_base 1: mod_base = OTHER; note = 2-O-methyl modified nucleoside
  modified_base 2: mod_base = OTHER; note = 2-O-methyl modified nucleoside
  modified_base 3: mod_base = OTHER; note = 2-O-methyl modified nucleoside
  modified_base 4: mod_base = OTHER; note = 2-O-methyl modified nucleoside
  modified_base 5: mod_base = OTHER; note = 2-O-methyl modified nucleoside
  modified_base 6: mod_base = OTHER; note = 2-O-methyl modified nucleoside
  modified_base 8: mod_base = OTHER; note = 2-O-methyl modified nucleoside
  modified_base 10: mod_base = OTHER; note = 2-O-methyl modified nucleoside
  modified_base 11: mod_base = OTHER; note = 2-O-methyl modified nucleoside
  modified_base 12: mod_base = OTHER; note = 2-O-methyl modified nucleoside
  modified_base 13: mod_base = OTHER; note = 2-O-methyl modified nucleoside
  modified_base 14: mod_base = OTHER; note = 2-O-methyl modified nucleoside
  modified_base 15: mod_base = OTHER; note = 2-O-methyl modified nucleoside
  modified_base 16: mod_base = OTHER; note = 2-O-methyl modified nucleoside
  modified_base 17: mod_base = OTHER; note = 2-O-methyl modified nucleoside
  modified_base 18: mod_base = OTHER; note = 2-O-methyl modified nucleoside
  modified_base 19: mod_base = OTHER; note = 2-O-methyl modified nucleoside
  modified_base 20: mod_base = OTHER; note = 2-O-methyl modified nucleoside
  modified_base 21: mod_base = OTHER; note = 2-O-methyl modified nucleoside
ccggaatttaattctctaatt

SEQ ID NO: 3487 - RNA, 21 nt, synthetic construct
  source 1..21: mol_type = other RNA
  modified_base 19^20: mod_base = OTHER; note = phosphorothioate linkage
  modified_base 20^21: mod_base = OTHER; note = phosphorothioate linkage
  modified_base 6: mod_base = OTHER; note = 2-fluoro-modified nucleoside
  modified_base 7: mod_base = OTHER; note = 2-fluoro-modified nucleoside
  modified_base 8: mod_base = OTHER; note = 2-fluoro-modified nucleoside
  modified_base 9: mod_base = OTHER; note = 2-fluoro-modified nucleoside
  modified_base 10: mod_base = OTHER; note = 2-fluoro-modified nucleoside
  modified_base 1: mod_base = OTHER; note = 2-O-methyl modified nucleoside
  modified_base 2: mod_base = OTHER; note = 2-O-methyl modified nucleoside
  modified_base 3: mod_base = OTHER; note = 2-O-methyl modified nucleoside
  modified_base 4: mod_base = OTHER; note = 2-O-methyl modified nucleoside
  modified_base 5: mod_base = OTHER; note = 2-O-methyl modified nucleoside
  modified_base 11: mod_base = OTHER; note = 2-O-methyl modified nucleoside
  modified_base 12: mod_base = OTHER; note = 2-O-methyl modified nucleoside
  modified_base 13: mod_base = OTHER; note = 2-O-methyl modified nucleoside
  modified_base 14: mod_base = OTHER; note = 2-O-methyl modified nucleoside
  modified_base 15: mod_base = OTHER; note = 2-O-methyl modified nucleoside
  modified_base 16: mod_base = OTHER; note = 2-O-methyl modified nucleoside
  modified_base 17: mod_base = OTHER; note = 2-O-methyl modified nucleoside
  modified_base 18: mod_base = OTHER; note = 2-O-methyl modified nucleoside
  modified_base 19: mod_base = OTHER; note = 2-O-methyl modified nucleoside
  modified_base 20: mod_base = OTHER; note = 2-O-methyl modified nucleoside
  modified_base 21: mod_base = OTHER; note = 2-O-methyl modified nucleoside
ctctacttctatgctcttatt

SEQ ID NO: 3488 - RNA, 21 nt, synthetic construct
  source 1..21: mol_type = other RNA
  modified_base 19^20: mod_base = OTHER; note = phosphorothioate linkage
  modified_base 20^21: mod_base = OTHER; note = phosphorothioate linkage
  modified_base 6: mod_base = OTHER; note = 2-fluoro-modified nucleoside
  modified_base 7: mod_base = OTHER; note = 2-fluoro-modified nucleoside
  modified_base 8: mod_base = OTHER; note = 2-fluoro-modified nucleoside
  modified_base 9: mod_base = OTHER; note = 2-fluoro-modified nucleoside
  modified_base 1: mod_base = OTHER; note = 2-O-methyl modified nucleoside
  modified_base 2: mod_base = OTHER; note = 2-O-methyl modified nucleoside
  modified_base 3: mod_base = OTHER; note = 2-O-methyl modified nucleoside
  modified_base 4: mod_base = OTHER; note = 2-O-methyl modified nucleoside
  modified_base 5: mod_base = OTHER; note = 2-O-methyl modified nucleoside
  modified_base 10: mod_base = OTHER; note = 2-O-methyl modified nucleoside
  modified_base 11: mod_base = OTHER; note = 2-O-methyl modified nucleoside
  modified_base 12: mod_base = OTHER; note = 2-O-methyl modified nucleoside
  modified_base 13: mod_base = OTHER; note = 2-O-methyl modified nucleoside
  modified_base 14: mod_base = OTHER; note = 2-O-methyl modified nucleoside
  modified_base 15: mod_base = OTHER; note = 2-O-methyl modified nucleoside
  modified_base 16: mod_base = OTHER; note = 2-O-methyl modified nucleoside
  modified_base 17: mod_base = OTHER; note = 2-O-methyl modified nucleoside
  modified_base 18: mod_base = OTHER; note = 2-O-methyl modified nucleoside
  modified_base 19: mod_base = OTHER; note = 2-O-methyl modified nucleoside
  modified_base 20: mod_base = OTHER; note = 2-O-methyl modified nucleoside
  modified_base 21: mod_base = OTHER; note = 2-O-methyl modified nucleoside
ctgcatcttagatgaaagatt

SEQ ID NO: 3489 - RNA, 21 nt, synthetic construct
  source 1..21: mol_type = other RNA
  modified_base 19^20: mod_base = OTHER; note = phosphorothioate linkage
  modified_base 20^21: mod_base = OTHER; note = phosphorothioate linkage
  modified_base 9: mod_base = OTHER; note = 2-fluoro-modified nucleoside
  modified_base 10: mod_base = OTHER; note = 2-fluoro-modified nucleoside
  modified_base 1: mod_base = OTHER; note = 2-O-methyl modified nucleoside
  modified_base 2: mod_base = OTHER; note = 2-O-methyl modified nucleoside
  modified_base 3: mod_base = OTHER; note = 2-O-methyl modified nucleoside
  modified_base 4: mod_base = OTHER; note = 2-O-methyl modified nucleoside
  modified_base 5: mod_base = OTHER; note = 2-O-methyl modified nucleoside
  modified_base 6: mod_base = OTHER; note = 2-O-methyl modified nucleoside
  modified_base 7: mod_base = OTHER; note = 2-O-methyl modified nucleoside
  modified_base 8: mod_base = OTHER; note = 2-O-methyl modified nucleoside
  modified_base 11: mod_base = OTHER; note = 2-O-methyl modified nucleoside
  modified_base 13: mod_base = OTHER; note = 2-O-methyl modified nucleoside
  modified_base 12: mod_base = OTHER; note = 2-O-methyl modified nucleoside
  modified_base 14: mod_base = OTHER; note = 2-O-methyl modified nucleoside
  modified_base 15: mod_base = OTHER; note = 2-O-methyl modified nucleoside
  modified_base 16: mod_base = OTHER; note = 2-O-methyl modified nucleoside
  modified_base 17: mod_base = OTHER; note = 2-O-methyl modified nucleoside
  modified_base 18: mod_base = OTHER; note = 2-O-methyl modified nucleoside
  modified_base 19: mod_base = OTHER; note = 2-O-methyl modified nucleoside
  modified_base 20: mod_base = OTHER; note = 2-O-methyl modified nucleoside
  modified_base 21: mod_base = OTHER; note = 2-O-methyl modified nucleoside
tgcatcttagatgaaagaatt

SEQ ID NO: 3490 - RNA, 21 nt, synthetic construct
  source 1..21: mol_type = other RNA
  modified_base 8: mod_base = OTHER; note = 2-fluoro-modified nucleoside
  modified_base 9: mod_base = OTHER; note = 2-fluoro-modified nucleoside
  modified_base 19^20: mod_base = OTHER; note = phosphorothioate linkage
  modified_base 20^21: mod_base = OTHER; note = phosphorothioate linkage
  modified_base 1: mod_base = OTHER; note = 2-O-methyl modified nucleoside
  modified_base 2: mod_base = OTHER; note = 2-O-methyl modified nucleoside
  modified_base 3: mod_base = OTHER; note = 2-O-methyl modified nucleoside
  modified_base 4: mod_base = OTHER; note = 2-O-methyl modified nucleoside
  modified_base 5: mod_base = OTHER; note = 2-O-methyl modified nucleoside
  modified_base 6: mod_base = OTHER; note = 2-O-methyl modified nucleoside
  modified_base 7: mod_base = OTHER; note = 2-O-methyl modified nucleoside
  modified_base 10: mod_base = OTHER; note = 2-O-methyl modified nucleoside
  modified_base 11: mod_base = OTHER; note = 2-O-methyl modified nucleoside
  modified_base 12: mod_base = OTHER; note = 2-O-methyl modified nucleoside
  modified_base 13: mod_base = OTHER; note = 2-O-methyl modified nucleoside
  modified_base 14: mod_base = OTHER; note = 2-O-methyl modified nucleoside
  modified_base 15: mod_base = OTHER; note = 2-O-methyl modified nucleoside
  modified_base 16: mod_base = OTHER; note = 2-O-methyl modified nucleoside
  modified_base 17: mod_base = OTHER; note = 2-O-methyl modified nucleoside
  modified_base 18: mod_base = OTHER; note = 2-O-methyl modified nucleoside
  modified_base 19: mod_base = OTHER; note = 2-O-methyl modified nucleoside
  modified_base 20: mod_base = OTHER; note = 2-O-methyl modified nucleoside
  modified_base 21: mod_base = OTHER; note = 2-O-methyl modified nucleoside
gcatcttagatgaaagatatt

SEQ ID NO: 3491 - RNA, 21 nt, synthetic construct
  source 1..21: mol_type = other RNA
  modified_base 5: mod_base = OTHER; note = 2-fluoro-modified nucleoside
  modified_base 6: mod_base = OTHER; note = 2-fluoro-modified nucleoside
  modified_base 9: mod_base = OTHER; note = 2-fluoro-modified nucleoside
  modified_base 11: mod_base = OTHER; note = 2-fluoro-modified nucleoside
  modified_base 19^20: mod_base = OTHER; note = phosphorothioate linkage
  modified_base 20^21: mod_base = OTHER; note = phosphorothioate linkage
  modified_base 1: mod_base = OTHER; note = 2-O-methyl modified nucleoside
  modified_base 2: mod_base = OTHER; note = 2-O-methyl modified nucleoside
  modified_base 3: mod_base = OTHER; note = 2-O-methyl modified nucleoside
  modified_base 4: mod_base = OTHER; note = 2-O-methyl modified nucleoside
  modified_base 7: mod_base = OTHER; note = 2-O-methyl modified nucleoside
  modified_base 8: mod_base = OTHER; note = 2-O-methyl modified nucleoside
  modified_base 10: mod_base = OTHER; note = 2-O-methyl modified nucleoside
  modified_base 12: mod_base = OTHER; note = 2-O-methyl modified nucleoside
  modified_base 13: mod_base = OTHER; note = 2-O-methyl modified nucleoside
  modified_base 14: mod_base = OTHER; note = 2-O-methyl modified nucleoside
  modified_base 16: mod_base = OTHER; note = 2-O-methyl modified nucleoside
  modified_base 15: mod_base = OTHER; note = 2-O-methyl modified nucleoside
  modified_base 17: mod_base = OTHER; note = 2-O-methyl modified nucleoside
  modified_base 18: mod_base = OTHER; note = 2-O-methyl modified nucleoside
  modified_base 19: mod_base = OTHER; note = 2-O-methyl modified nucleoside
  modified_base 20: mod_base = OTHER; note = 2-O-methyl modified nucleoside
  modified_base 21: mod_base = OTHER; note = 2-O-methyl modified nucleoside
tcttagatgaaagattcgatt

SEQ ID NO: 3492 - RNA, 21 nt, synthetic construct
  source 1..21: mol_type = other RNA
  modified_base 19^20: mod_base = OTHER; note = phosphorothioate linkage
  modified_base 20^21: mod_base = OTHER; note = phosphorothioate linkage
  modified_base 5: mod_base = OTHER; note = 2-fluoro-modified nucleoside
  modified_base 7: mod_base = OTHER; note = 2-fluoro-modified nucleoside
  modified_base 8: mod_base = OTHER; note = 2-fluoro-modified nucleoside
  modified_base 9: mod_base = OTHER; note = 2-fluoro-modified nucleoside
  modified_base 10: mod_base = OTHER; note = 2-fluoro-modified nucleoside
  modified_base 1: mod_base = OTHER; note = 2-O-methyl modified nucleoside
  modified_base 2: mod_base = OTHER; note = 2-O-methyl modified nucleoside
  modified_base 3: mod_base = OTHER; note = 2-O-methyl modified nucleoside
  modified_base 4: mod_base = OTHER; note = 2-O-methyl modified nucleoside
  modified_base 6: mod_base = OTHER; note = 2-O-methyl modified nucleoside
  modified_base 11: mod_base = OTHER; note = 2-O-methyl modified nucleoside
  modified_base 12: mod_base = OTHER; note = 2-O-methyl modified nucleoside
  modified_base 13: mod_base = OTHER; note = 2-O-methyl modified nucleoside
  modified_base 14: mod_base = OTHER; note = 2-O-methyl modified nucleoside
  modified_base 15: mod_base = OTHER; note = 2-O-methyl modified nucleoside
  modified_base 16: mod_base = OTHER; note = 2-O-methyl modified nucleoside
  modified_base 17: mod_base = OTHER; note = 2-O-methyl modified nucleoside
  modified_base 18: mod_base = OTHER; note = 2-O-methyl modified nucleoside
  modified_base 19: mod_base = OTHER; note = 2-O-methyl modified nucleoside
  modified_base 20: mod_base = OTHER; note = 2-O-methyl modified nucleoside
  modified_base 21: mod_base = OTHER; note = 2-O-methyl modified nucleoside
ttagatgaaagattcggtatt

SEQ ID NO: 3493 - RNA, 21 nt, synthetic construct
  source 1..21: mol_type = other RNA
  modified_base 19^20: mod_base = OTHER; note = phosphorothioate linkage
  modified_base 20^21: mod_base = OTHER; note = phosphorothioate linkage
  modified_base 6: mod_base = OTHER; note = 2-fluoro-modified nucleoside
  modified_base 7: mod_base = OTHER; note = 2-fluoro-modified nucleoside
  modified_base 8: mod_base = OTHER; note = 2-fluoro-modified nucleoside
  modified_base 9: mod_base = OTHER; note = 2-fluoro-modified nucleoside
  modified_base 11: mod_base = OTHER; note = 2-fluoro-modified nucleoside
  modified_base 1: mod_base = OTHER; note = 2-O-methyl modified nucleoside
  modified_base 2: mod_base = OTHER; note = 2-O-methyl modified nucleoside
  modified_base 3: mod_base = OTHER; note = 2-O-methyl modified nucleoside
  modified_base 4: mod_base = OTHER; note = 2-O-methyl modified nucleoside
  modified_base 5: mod_base = OTHER; note = 2-O-methyl modified nucleoside
  modified_base 10: mod_base = OTHER; note = 2-O-methyl modified nucleoside
  modified_base 12: mod_base = OTHER; note = 2-O-methyl modified nucleoside
  modified_base 13: mod_base = OTHER; note = 2-O-methyl modified nucleoside
  modified_base 14: mod_base = OTHER; note = 2-O-methyl modified nucleoside
  modified_base 15: mod_base = OTHER; note = 2-O-methyl modified nucleoside
  modified_base 16: mod_base = OTHER; note = 2-O-methyl modified nucleoside
  modified_base 17: mod_base = OTHER; note = 2-O-methyl modified nucleoside
  modified_base 18: mod_base = OTHER; note = 2-O-methyl modified nucleoside
  modified_base 19: mod_base = OTHER; note = 2-O-methyl modified nucleoside
  modified_base 20: mod_base = OTHER; note = 2-O-methyl modified nucleoside
  modified_base 21: mod_base = OTHER; note = 2-O-methyl modified nucleoside
tagatgaaagattcggtaatt

SEQ ID NO: 3494 - RNA, 21 nt, synthetic construct
  source 1..21: mol_type = other RNA
  modified_base 5: mod_base = OTHER; note = 2-fluoro-modified nucleoside
  modified_base 6: mod_base = OTHER; note = 2-fluoro-modified nucleoside
  modified_base 7: mod_base = OTHER; note = 2-fluoro-modified nucleoside
  modified_base 8: mod_base = OTHER; note = 2-fluoro-modified nucleoside
  modified_base 9: mod_base = OTHER; note = 2-fluoro-modified nucleoside
  modified_base 19^20: mod_base = OTHER; note = phosphorothioate linkage
  modified_base 20^21: mod_base = OTHER; note = phosphorothioate linkage
  modified_base 1: mod_base = OTHER; note = 2-O-methyl modified nucleoside
  modified_base 2: mod_base = OTHER; note = 2-O-methyl modified nucleoside
  modified_base 3: mod_base = OTHER; note = 2-O-methyl modified nucleoside
  modified_base 4: mod_base = OTHER; note = 2-O-methyl modified nucleoside
  modified_base 11: mod_base = OTHER; note = 2-O-methyl modified nucleoside
  modified_base 10: mod_base = OTHER; note = 2-O-methyl modified nucleoside
  modified_base 12: mod_base = OTHER; note = 2-O-methyl modified nucleoside
  modified_base 13: mod_base = OTHER; note = 2-O-methyl modified nucleoside
  modified_base 14: mod_base = OTHER; note = 2-O-methyl modified nucleoside
  modified_base 15: mod_base = OTHER; note = 2-O-methyl modified nucleoside
  modified_base 16: mod_base = OTHER; note = 2-O-methyl modified nucleoside
  modified_base 17: mod_base = OTHER; note = 2-O-methyl modified nucleoside
  modified_base 18: mod_base = OTHER; note = 2-O-methyl modified nucleoside
  modified_base 19: mod_base = OTHER; note = 2-O-methyl modified nucleoside
  modified_base 20: mod_base = OTHER; note = 2-O-methyl modified nucleoside
  modified_base 21: mod_base = OTHER; note = 2-O-methyl modified nucleoside
agatgaaagattcggtagatt

SEQ ID NO: 3495 - RNA, 21 nt, synthetic construct
  source 1..21: mol_type = other RNA
  modified_base 19^20: mod_base = OTHER; note = phosphorothioate linkage
  modified_base 20^21: mod_base = OTHER; note = phosphorothioate linkage
  modified_base 5: mod_base = OTHER; note = 2-fluoro-modified nucleoside
  modified_base 6: mod_base = OTHER; note = 2-fluoro-modified nucleoside
  modified_base 7: mod_base = OTHER; note = 2-fluoro-modified nucleoside
  modified_base 8: mod_base = OTHER; note = 2-fluoro-modified nucleoside
  modified_base 9: mod_base = OTHER; note = 2-fluoro-modified nucleoside
  modified_base 1: mod_base = OTHER; note = 2-O-methyl modified nucleoside
  modified_base 2: mod_base = OTHER; note = 2-O-methyl modified nucleoside
  modified_base 3: mod_base = OTHER; note = 2-O-methyl modified nucleoside
  modified_base 4: mod_base = OTHER; note = 2-O-methyl modified nucleoside
  modified_base 10: mod_base = OTHER; note = 2-O-methyl modified nucleoside
  modified_base 11: mod_base = OTHER; note = 2-O-methyl modified nucleoside
  modified_base 12: mod_base = OTHER; note = 2-O-methyl modified nucleoside
  modified_base 13: mod_base = OTHER; note = 2-O-methyl modified nucleoside
  modified_base 14: mod_base = OTHER; note = 2-O-methyl modified nucleoside
  modified_base 15: mod_base = OTHER; note = 2-O-methyl modified nucleoside
  modified_base 16: mod_base = OTHER; note = 2-O-methyl modified nucleoside
  modified_base 17: mod_base = OTHER; note = 2-O-methyl modified nucleoside
  modified_base 18: mod_base = OTHER; note = 2-O-methyl modified nucleoside
  modified_base 19: mod_base = OTHER; note = 2-O-methyl modified nucleoside
  modified_base 20: mod_base = OTHER; note = 2-O-methyl modified nucleoside
  modified_base 21: mod_base = OTHER; note = 2-O-methyl modified nucleoside
gatgaaagattcggtagtatt

SEQ ID NO: 3496 - RNA, 21 nt, synthetic construct
  source 1..21: mol_type = other RNA
  modified_base 19^20: mod_base = OTHER; note = phosphorothioate linkage
  modified_base 20^21: mod_base = OTHER; note = phosphorothioate linkage
  modified_base 8: mod_base = OTHER; note = 2-fluoro-modified nucleoside
  modified_base 9: mod_base = OTHER; note = 2-fluoro-modified nucleoside
  modified_base 1: mod_base = OTHER; note = 2-O-methyl modified nucleoside
  modified_base 2: mod_base = OTHER; note = 2-O-methyl modified nucleoside
  modified_base 3: mod_base = OTHER; note = 2-O-methyl modified nucleoside
  modified_base 4: mod_base = OTHER; note = 2-O-methyl modified nucleoside
  modified_base 5: mod_base = OTHER; note = 2-O-methyl modified nucleoside
  modified_base 6: mod_base = OTHER; note = 2-O-methyl modified nucleoside
  modified_base 7: mod_base = OTHER; note = 2-O-methyl modified nucleoside
  modified_base 10: mod_base = OTHER; note = 2-O-methyl modified nucleoside
  modified_base 11: mod_base = OTHER; note = 2-O-methyl modified nucleoside
  modified_base 12: mod_base = OTHER; note = 2-O-methyl modified nucleoside
  modified_base 13: mod_base = OTHER; note = 2-O-methyl modified nucleoside
  modified_base 14: mod_base = OTHER; note = 2-O-methyl modified nucleoside
  modified_base 15: mod_base = OTHER; note = 2-O-methyl modified nucleoside
  modified_base 16: mod_base = OTHER; note = 2-O-methyl modified nucleoside
  modified_base 17: mod_base = OTHER; note = 2-O-methyl modified nucleoside
  modified_base 18: mod_base = OTHER; note = 2-O-methyl modified nucleoside
  modified_base 19: mod_base = OTHER; note = 2-O-methyl modified nucleoside
  modified_base 20: mod_base = OTHER; note = 2-O-methyl modified nucleoside
  modified_base 21: mod_base = OTHER; note = 2-O-methyl modified nucleoside
tgaaagattcggtagttaatt

SEQ ID NO: 3497 - RNA, 21 nt, synthetic construct
  source 1..21: mol_type = other RNA
  modified_base 19^20: mod_base = OTHER; note = phosphorothioate linkage
  modified_base 20^21: mod_base = OTHER; note = phosphorothioate linkage
  modified_base 7: mod_base = OTHER; note = 2-fluoro-modified nucleoside
  modified_base 9: mod_base = OTHER; note = 2-fluoro-modified nucleoside
  modified_base 1: mod_base = OTHER; note = 2-O-methyl modified nucleoside
  modified_base 2: mod_base = OTHER; note = 2-O-methyl modified nucleoside
  modified_base 3: mod_base = OTHER; note = 2-O-methyl modified nucleoside
  modified_base 4: mod_base = OTHER; note = 2-O-methyl modified nucleoside
  modified_base 5: mod_base = OTHER; note = 2-O-methyl modified nucleoside
  modified_base 6: mod_base = OTHER; note = 2-O-methyl modified nucleoside
  modified_base 8: mod_base = OTHER; note = 2-O-methyl modified nucleoside
  modified_base 10: mod_base = OTHER; note = 2-O-methyl modified nucleoside
  modified_base 11: mod_base = OTHER; note = 2-O-methyl modified nucleoside
  modified_base 12: mod_base = OTHER; note = 2-O-methyl modified nucleoside
  modified_base 13: mod_base = OTHER; note = 2-O-methyl modified nucleoside
  modified_base 14: mod_base = OTHER; note = 2-O-methyl modified nucleoside
  modified_base 15: mod_base = OTHER; note = 2-O-methyl modified nucleoside
  modified_base 16: mod_base = OTHER; note = 2-O-methyl modified nucleoside
  modified_base 17: mod_base = OTHER; note = 2-O-methyl modified nucleoside
  modified_base 18: mod_base = OTHER; note = 2-O-methyl modified nucleoside
  modified_base 19: mod_base = OTHER; note = 2-O-methyl modified nucleoside
  modified_base 20: mod_base = OTHER; note = 2-O-methyl modified nucleoside
  modified_base 21: mod_base = OTHER; note = 2-O-methyl modified nucleoside
gaaagattcggtagttatatt

SEQ ID NO: 3498 - RNA, 21 nt, synthetic construct
  source 1..21: mol_type = other RNA
  modified_base 6: mod_base = OTHER; note = 2-fluoro-modified nucleoside
  modified_base 7: mod_base = OTHER; note = 2-fluoro-modified nucleoside
  modified_base 9: mod_base = OTHER; note = 2-fluoro-modified nucleoside
  modified_base 10: mod_base = OTHER; note = 2-fluoro-modified nucleoside
  modified_base 19^20: mod_base = OTHER; note = phosphorothioate linkage
  modified_base 20^21: mod_base = OTHER; note = phosphorothioate linkage
  modified_base 1: mod_base = OTHER; note = 2-O-methyl modified nucleoside
  modified_base 2: mod_base = OTHER; note = 2-O-methyl modified nucleoside
  modified_base 3: mod_base = OTHER; note = 2-O-methyl modified nucleoside
  modified_base 4: mod_base = OTHER; note = 2-O-methyl modified nucleoside
  modified_base 5: mod_base = OTHER; note = 2-O-methyl modified nucleoside
  modified_base 8: mod_base = OTHER; note = 2-O-methyl modified nucleoside
  modified_base 11: mod_base = OTHER; note = 2-O-methyl modified nucleoside
  modified_base 12: mod_base = OTHER; note = 2-O-methyl modified nucleoside
  modified_base 13: mod_base = OTHER; note = 2-O-methyl modified nucleoside
  modified_base 14: mod_base = OTHER; note = 2-O-methyl modified nucleoside
  modified_base 15: mod_base = OTHER; note = 2-O-methyl modified nucleoside
  modified_base 16: mod_base = OTHER; note = 2-O-methyl modified nucleoside
  modified_base 17: mod_base = OTHER; note = 2-O-methyl modified nucleoside
  modified_base 18: mod_base = OTHER; note = 2-O-methyl modified nucleoside
  modified_base 19: mod_base = OTHER; note = 2-O-methyl modified nucleoside
  modified_base 20: mod_base = OTHER; note = 2-O-methyl modified nucleoside
  modified_base 21: mod_base = OTHER; note = 2-O-methyl modified nucleoside
gattcggtagttattgtcatt

SEQ ID NO: 3499 - RNA, 21 nt, synthetic construct
  source 1..21: mol_type = other RNA
  modified_base 5: mod_base = OTHER; note = 2-fluoro-modified nucleoside
  modified_base 6: mod_base = OTHER; note = 2-fluoro-modified nucleoside
  modified_base 9: mod_base = OTHER; note = 2-fluoro-modified nucleoside
  modified_base 19^20: mod_base = OTHER; note = phosphorothioate linkage
  modified_base 20^21: mod_base = OTHER; note = phosphorothioate linkage
  modified_base 1: mod_base = OTHER; note = 2-O-methyl modified nucleoside
  modified_base 2: mod_base = OTHER; note = 2-O-methyl modified nucleoside
  modified_base 3: mod_base = OTHER; note = 2-O-methyl modified nucleoside
  modified_base 4: mod_base = OTHER; note = 2-O-methyl modified nucleoside
  modified_base 7: mod_base = OTHER; note = 2-O-methyl modified nucleoside
  modified_base 8: mod_base = OTHER; note = 2-O-methyl modified nucleoside
  modified_base 10: mod_base = OTHER; note = 2-O-methyl modified nucleoside
  modified_base 11: mod_base = OTHER; note = 2-O-methyl modified nucleoside
  modified_base 12: mod_base = OTHER; note = 2-O-methyl modified nucleoside
  modified_base 13: mod_base = OTHER; note = 2-O-methyl modified nucleoside
  modified_base 14: mod_base = OTHER; note = 2-O-methyl modified nucleoside
  modified_base 15: mod_base = OTHER; note = 2-O-methyl modified nucleoside
  modified_base 16: mod_base = OTHER; note = 2-O-methyl modified nucleoside
  modified_base 17: mod_base = OTHER; note = 2-O-methyl modified nucleoside
  modified_base 18: mod_base = OTHER; note = 2-O-methyl modified nucleoside
  modified_base 19: mod_base = OTHER; note = 2-O-methyl modified nucleoside
  modified_base 20: mod_base = OTHER; note = 2-O-methyl modified nucleoside
  modified_base 21: mod_base = OTHER; note = 2-O-methyl modified nucleoside
cggtagttattgtccaacatt

SEQ ID NO: 3500 - RNA, 21 nt, synthetic construct
  source 1..21: mol_type = other RNA
  modified_base 5: mod_base = OTHER; note = 2-fluoro-modified nucleoside
  modified_base 6: mod_base = OTHER; note = 2-fluoro-modified nucleoside
  modified_base 8: mod_base = OTHER; note = 2-fluoro-modified nucleoside
  modified_base 9: mod_base = OTHER; note = 2-fluoro-modified nucleoside
  modified_base 11: mod_base = OTHER; note = 2-fluoro-modified nucleoside
  modified_base 1: mod_base = OTHER; note = 2-O-methyl modified nucleoside
  modified_base 2: mod_base = OTHER; note = 2-O-methyl modified nucleoside
  modified_base 3: mod_base = OTHER; note = 2-O-methyl modified nucleoside
  modified_base 4: mod_base = OTHER; note = 2-O-methyl modified nucleoside
  modified_base 7: mod_base = OTHER; note = 2-O-methyl modified nucleoside
  modified_base 10: mod_base = OTHER; note = 2-O-methyl modified nucleoside
  modified_base 12: mod_base = OTHER; note = 2-O-methyl modified nucleoside
  modified_base 13: mod_base = OTHER; note = 2-O-methyl modified nucleoside
  modified_base 14: mod_base = OTHER; note = 2-O-methyl modified nucleoside
  modified_base 15: mod_base = OTHER; note = 2-O-methyl modified nucleoside
  modified_base 16: mod_base = OTHER; note = 2-O-methyl modified nucleoside
  modified_base 17: mod_base = OTHER; note = 2-O-methyl modified nucleoside
  modified_base 18: mod_base = OTHER; note = 2-O-methyl modified nucleoside
  modified_base 19: mod_base = OTHER; note = 2-O-methyl modified nucleoside
  modified_base 20: mod_base = OTHER; note = 2-O-methyl modified nucleoside
  modified_base 21: mod_base = OTHER; note = 2-O-methyl modified nucleoside
  modified_base 19^20: mod_base = OTHER; note = phosphorothioate linkage
  modified_base 20^21: mod_base = OTHER; note = phosphorothioate linkage
gtagttattgtccaactaatt

SEQ ID NO: 3501 - RNA, 21 nt, synthetic construct
  source 1..21: mol_type = other RNA
  modified_base 19^20: mod_base = OTHER; note = phosphorothioate linkage
  modified_base 20^21: mod_base = OTHER; note = phosphorothioate linkage
  modified_base 6: mod_base = OTHER; note = 2-fluoro-modified nucleoside
  modified_base 7: mod_base = OTHER; note = 2-fluoro-modified nucleoside
  modified_base 9: mod_base = OTHER; note = 2-fluoro-modified nucleoside
  modified_base 11: mod_base = OTHER; note = 2-fluoro-modified nucleoside
  modified_base 1: mod_base = OTHER; note = 2-O-methyl modified nucleoside
  modified_base 2: mod_base = OTHER; note = 2-O-methyl modified nucleoside
  modified_base 3: mod_base = OTHER; note = 2-O-methyl modified nucleoside
  modified_base 4: mod_base = OTHER; note = 2-O-methyl modified nucleoside
  modified_base 5: mod_base = OTHER; note = 2-O-methyl modified nucleoside
  modified_base 8: mod_base = OTHER; note = 2-O-methyl modified nucleoside
  modified_base 10: mod_base = OTHER; note = 2-O-methyl modified nucleoside
  modified_base 12: mod_base = OTHER; note = 2-O-methyl modified nucleoside
  modified_base 13: mod_base = OTHER; note = 2-O-methyl modified nucleoside
  modified_base 14: mod_base = OTHER; note = 2-O-methyl modified nucleoside
  modified_base 15: mod_base = OTHER; note = 2-O-methyl modified nucleoside
  modified_base 16: mod_base = OTHER; note = 2-O-methyl modified nucleoside
  modified_base 17: mod_base = OTHER; note = 2-O-methyl modified nucleoside
  modified_base 18: mod_base = OTHER; note = 2-O-methyl modified nucleoside
  modified_base 19: mod_base = OTHER; note = 2-O-methyl modified nucleoside
  modified_base 20: mod_base = OTHER; note = 2-O-methyl modified nucleoside
  modified_base 21: mod_base = OTHER; note = 2-O-methyl modified nucleoside
agttattgtccaactaccatt

SEQ ID NO: 3502 - RNA, 21 nt, synthetic construct
  source 1..21: mol_type = other RNA
  modified_base 19^20: mod_base = OTHER; note = phosphorothioate linkage
  modified_base 20^21: mod_base = OTHER; note = phosphorothioate linkage
  modified_base 9: mod_base = OTHER; note = 2-fluoro-modified nucleoside
  modified_base 1: mod_base = OTHER; note = 2-O-methyl modified nucleoside
  modified_base 2: mod_base = OTHER; note = 2-O-methyl modified nucleoside
  modified_base 3: mod_base = OTHER; note = 2-O-methyl modified nucleoside
  modified_base 4: mod_base = OTHER; note = 2-O-methyl modified nucleoside
  modified_base 5: mod_base = OTHER; note = 2-O-methyl modified nucleoside
  modified_base 6: mod_base = OTHER; note = 2-O-methyl modified nucleoside
  modified_base 7: mod_base = OTHER; note = 2-O-methyl modified nucleoside
  modified_base 8: mod_base = OTHER; note = 2-O-methyl modified nucleoside
  modified_base 10: mod_base = OTHER; note = 2-O-methyl modified nucleoside
  modified_base 11: mod_base = OTHER; note = 2-O-methyl modified nucleoside
  modified_base 12: mod_base = OTHER; note = 2-O-methyl modified nucleoside
  modified_base 13: mod_base = OTHER; note = 2-O-methyl modified nucleoside
  modified_base 14: mod_base = OTHER; note = 2-O-methyl modified nucleoside
  modified_base 15: mod_base = OTHER; note = 2-O-methyl modified nucleoside
  modified_base 16: mod_base = OTHER; note = 2-O-methyl modified nucleoside
  modified_base 17: mod_base = OTHER; note = 2-O-methyl modified nucleoside
  modified_base 18: mod_base = OTHER; note = 2-O-methyl modified nucleoside
  modified_base 19: mod_base = OTHER; note = 2-O-methyl modified nucleoside
  modified_base 20: mod_base = OTHER; note = 2-O-methyl modified nucleoside
  modified_base 21: mod_base = OTHER; note = 2-O-methyl modified nucleoside
gatttcctgtctacttatatt

SEQ ID NO: 3503 - RNA, 21 nt, synthetic construct
  source 1..21: mol_type = other RNA
  modified_base 19^20: mod_base = OTHER; note = phosphorothioate linkage
  modified_base 20^21: mod_base = OTHER; note = phosphorothioate linkage
  modified_base 5: mod_base = OTHER; note = 2-fluoro-modified nucleoside
  modified_base 6: mod_base = OTHER; note = 2-fluoro-modified nucleoside
  modified_base 9: mod_base = OTHER; note = 2-fluoro-modified nucleoside
  modified_base 11: mod_base = OTHER; note = 2-fluoro-modified nucleoside
atttcctgtctacttatcatt

SEQ ID NO: 3504 - RNA, 21 nt, synthetic construct
  source 1..21: mol_type = other RNA
  modified_base 19^20: mod_base = OTHER; note = phosphorothioate linkage
  modified_base 20^21: mod_base = OTHER; note = phosphorothioate linkage
  modified_base 5: mod_base = OTHER; note = 2-fluoro-modified nucleoside
  modified_base 6: mod_base = OTHER; note = 2-fluoro-modified nucleoside
  modified_base 8: mod_base = OTHER; note = 2-fluoro-modified nucleoside
  modified_base 9: mod_base = OTHER; note = 2-fluoro-modified nucleoside
  modified_base 11: mod_base = OTHER; note = 2-fluoro-modified nucleoside
agtagacaaggatctacaatt

SEQ ID NO: 3505 - RNA, 21 nt, synthetic construct
  source 1..21: mol_type = other RNA
  modified_base 19^20: mod_base = OTHER; note = phosphorothioate linkage
  modified_base 20^21: mod_base = OTHER; note = phosphorothioate linkage
  modified_base 7: mod_base = OTHER; note = 2-fluoro-modified nucleoside
  modified_base 9: mod_base = OTHER; note = 2-fluoro-modified nucleoside
  modified_base 10: mod_base = OTHER; note = 2-fluoro-modified nucleoside
ggatctacagtctttggaatt

SEQ ID NO: 3506 - RNA, 21 nt, synthetic construct
  source 1..21: mol_type = other RNA
  modified_base 19^20: mod_base = OTHER; note = phosphorothioate linkage
  modified_base 20^21: mod_base = OTHER; note = phosphorothioate linkage
  modified_base 6: mod_base = OTHER; note = 2-fluoro-modified nucleoside
  modified_base 9: mod_base = OTHER; note = 2-fluoro-modified nucleoside
  modified_base 11: mod_base = OTHER; note = 2-fluoro-modified nucleoside
atctacagtctttggaagatt

SEQ ID NO: 3507 - RNA, 21 nt, synthetic construct
  source 1..21: mol_type = other RNA
  modified_base 7: mod_base = OTHER; note = 2-fluoro-modified nucleoside
  modified_base 9: mod_base = OTHER; note = 2-fluoro-modified nucleoside
  modified_base 11: mod_base = OTHER; note = 2-fluoro-modified nucleoside
  modified_base 19^20: mod_base = OTHER; note = phosphorothioate linkage
  modified_base 20^21: mod_base = OTHER; note = phosphorothioate linkage
ggaagacatcttacatcaatt

SEQ ID NO: 3508 - RNA, 21 nt, synthetic construct
  source 1..21: mol_type = other RNA
  modified_base 19^20: mod_base = OTHER; note = phosphorothioate linkage
  modified_base 20^21: mod_base = OTHER; note = phosphorothioate linkage
  modified_base 5: mod_base = OTHER; note = 2-fluoro-modified nucleoside
  modified_base 7: mod_base = OTHER; note = 2-fluoro-modified nucleoside
  modified_base 8: mod_base = OTHER; note = 2-fluoro-modified nucleoside
  modified_base 9: mod_base = OTHER; note = 2-fluoro-modified nucleoside
  modified_base 10: mod_base = OTHER; note = 2-fluoro-modified nucleoside
aagacatcttacatcaagatt

SEQ ID NO: 3509 - RNA, 21 nt, synthetic construct
  source 1..21: mol_type = other RNA
  modified_base 6: mod_base = OTHER; note = 2-fluoro-modified nucleoside
  modified_base 7: mod_base = OTHER; note = 2-fluoro-modified nucleoside
  modified_base 9: mod_base = OTHER; note = 2-fluoro-modified nucleoside
  modified_base 11: mod_base = OTHER; note = 2-fluoro-modified nucleoside
  modified_base 19^20: mod_base = OTHER; note = phosphorothioate linkage
  modified_base 20^21: mod_base = OTHER; note = phosphorothioate linkage
cagctgataaaagcaatcatt

SEQ ID NO: 3510 - RNA, 21 nt, synthetic construct
  source 1..21: mol_type = other RNA
  modified_base 19^20: mod_base = OTHER; note = phosphorothioate linkage
  modified_base 20^21: mod_base = OTHER; note = phosphorothioate linkage
  modified_base 5: mod_base = OTHER; note = 2-fluoro-modified nucleoside
  modified_base 6: mod_base = OTHER; note = 2-fluoro-modified nucleoside
  modified_base 8: mod_base = OTHER; note = 2-fluoro-modified nucleoside
  modified_base 9: mod_base = OTHER; note = 2-fluoro-modified nucleoside
  modified_base 11: mod_base = OTHER; note = 2-fluoro-modified nucleoside
tgataaaagcaatccaacatt

SEQ ID NO: 3511 - RNA, 21 nt, synthetic construct
  source 1..21: mol_type = other RNA
  modified_base 19^20: mod_base = OTHER; note = phosphorothioate linkage
  modified_base 20^21: mod_base = OTHER; note = phosphorothioate linkage
  modified_base 5: mod_base = OTHER; note = 2-fluoro-modified nucleoside
  modified_base 6: mod_base = OTHER; note = 2-fluoro-modified nucleoside
  modified_base 9: mod_base = OTHER; note = 2-fluoro-modified nucleoside
aatcctgatgaatcatcaatt

SEQ ID NO: 3512 - RNA, 21 nt, synthetic construct
  source 1..21: mol_type = other RNA
  modified_base 19^20: mod_base = OTHER; note = phosphorothioate linkage
  modified_base 20^21: mod_base = OTHER; note = phosphorothioate linkage
  modified_base 8: mod_base = OTHER; note = 2-fluoro-modified nucleoside
  modified_base 9: mod_base = OTHER; note = 2-fluoro-modified nucleoside
  modified_base 11: mod_base = OTHER; note = 2-fluoro-modified nucleoside
tgatgaatcatcaaaaccatt

SEQ ID NO: 3513 - RNA, 21 nt, synthetic construct
  source 1..21: mol_type = other RNA
  modified_base 5: mod_base = OTHER; note = 2-fluoro-modified nucleoside
  modified_base 6: mod_base = OTHER; note = 2-fluoro-modified nucleoside
  modified_base 8: mod_base = OTHER; note = 2-fluoro-modified nucleoside
  modified_base 9: mod_base = OTHER; note = 2-fluoro-modified nucleoside
  modified_base 11: mod_base = OTHER; note = 2-fluoro-modified nucleoside
  modified_base 19^20: mod_base = OTHER; note = phosphorothioate linkage
  modified_base 20^21: mod_base = OTHER; note = phosphorothioate linkage
gtccaggaaaatgttagaatt

SEQ ID NO: 3514 - RNA, 21 nt, synthetic construct
  source 1..21: mol_type = other RNA
  modified_base 19^20: mod_base = OTHER; note = phosphorothioate linkage
  modified_base 20^21: mod_base = OTHER; note = phosphorothioate linkage
  modified_base 7: mod_base = OTHER; note = 2-fluoro-modified nucleoside
  modified_base 9: mod_base = OTHER; note = 2-fluoro-modified nucleoside
  modified_base 10: mod_base = OTHER; note = 2-fluoro-modified nucleoside
ccatgatatcactgggaaatt

SEQ ID NO: 3515 - RNA, 21 nt, synthetic construct
  source 1..21: mol_type = other RNA
  modified_base 5: mod_base = OTHER; note = 2-fluoro-modified nucleoside
  modified_base 6: mod_base = OTHER; note = 2-fluoro-modified nucleoside
  modified_base 8: mod_base = OTHER; note = 2-fluoro-modified nucleoside
  modified_base 9: mod_base = OTHER; note = 2-fluoro-modified nucleoside
  modified_base 19^20: mod_base = OTHER; note = phosphorothioate linkage
  modified_base 20^21: mod_base = OTHER; note = phosphorothioate linkage
aagattgtcaagacattgatt

SEQ ID NO: 3516 - RNA, 21 nt, synthetic construct
  source 1..21: mol_type = other RNA
  modified_base 19^20: mod_base = OTHER; note = phosphorothioate linkage
  modified_base 20^21: mod_base = OTHER; note = phosphorothioate linkage
  modified_base 5: mod_base = OTHER; note = 2-fluoro-modified nucleoside
  modified_base 9: mod_base = OTHER; note = 2-fluoro-modified nucleoside
  modified_base 11: mod_base = OTHER; note = 2-fluoro-modified nucleoside
agagcgggctttactttaatt

SEQ ID NO: 3517 - RNA, 21 nt, synthetic construct
  source 1..21: mol_type = other RNA
  modified_base 19^20: mod_base = OTHER; note = phosphorothioate linkage
  modified_base 20^21: mod_base = OTHER; note = phosphorothioate linkage
  modified_base 5: mod_base = OTHER; note = 2-fluoro-modified nucleoside
  modified_base 6: mod_base = OTHER; note = 2-fluoro-modified nucleoside
  modified_base 7: mod_base = OTHER; note = 2-fluoro-modified nucleoside
  modified_base 8: mod_base = OTHER; note = 2-fluoro-modified nucleoside
  modified_base 9: mod_base = OTHER; note = 2-fluoro-modified nucleoside
taaacctctgaaagctaaatt

SEQ ID NO: 3518 - RNA, 21 nt, synthetic construct
  source 1..21: mol_type = other RNA
  modified_base 19^20: mod_base = OTHER; note = phosphorothioate linkage
  modified_base 20^21: mod_base = OTHER; note = phosphorothioate linkage
  modified_base 5: mod_base = OTHER; note = 2-fluoro-modified nucleoside
  modified_base 6: mod_base = OTHER; note = 2-fluoro-modified nucleoside
  modified_base 7: mod_base = OTHER; note = 2-fluoro-modified nucleoside
  modified_base 8: mod_base = OTHER; note = 2-fluoro-modified nucleoside
  modified_base 9: mod_base = OTHER; note = 2-fluoro-modified nucleoside
tcaagaaaaactggattcatt

SEQ ID NO: 3519 - RNA, 21 nt, synthetic construct
  source 1..21: mol_type = other RNA
  modified_base 19^20: mod_base = OTHER; note = phosphorothioate linkage
  modified_base 20^21: mod_base = OTHER; note = phosphorothioate linkage
  modified_base 8: mod_base = OTHER; note = 2-fluoro-modified nucleoside
  modified_base 9: mod_base = OTHER; note = 2-fluoro-modified nucleoside
agaaaaactggattcaatatt

SEQ ID NO: 3520 - RNA, 21 nt, synthetic construct
  source 1..21: mol_type = other RNA
  modified_base 19^20: mod_base = OTHER; note = phosphorothioate linkage
  modified_base 20^21: mod_base = OTHER; note = phosphorothioate linkage
  modified_base 5: mod_base = OTHER; note = 2-fluoro-modified nucleoside
  modified_base 7: mod_base = OTHER; note = 2-fluoro-modified nucleoside
  modified_base 8: mod_base = OTHER; note = 2-fluoro-modified nucleoside
  modified_base 9: mod_base = OTHER; note = 2-fluoro-modified nucleoside
  modified_base 10: mod_base = OTHER; note = 2-fluoro-modified nucleoside
ggaaatgagaagattcatatt

SEQ ID NO: 3521 - RNA, 21 nt, synthetic construct
  source 1..21: mol_type = other RNA
  modified_base 19^20: mod_base = OTHER; note = phosphorothioate linkage
  modified_base 20^21: mod_base = OTHER; note = phosphorothioate linkage
  modified_base 5: mod_base = OTHER; note = 2-fluoro-modified nucleoside
  modified_base 9: mod_base = OTHER; note = 2-fluoro-modified nucleoside
gaagattcatttgataagatt

SEQ ID NO: 3522 - RNA, 21 nt, synthetic construct
  source 1..21: mol_type = other RNA
  modified_base 19^20: mod_base = OTHER; note = phosphorothioate linkage
  modified_base 20^21: mod_base = OTHER; note = phosphorothioate linkage
  modified_base 5: mod_base = OTHER; note = 2-fluoro-modified nucleoside
  modified_base 6: mod_base = OTHER; note = 2-fluoro-modified nucleoside
  modified_base 8: mod_base = OTHER; note = 2-fluoro-modified nucleoside
  modified_base 9: mod_base = OTHER; note = 2-fluoro-modified nucleoside
agattcatttgataagcaatt

SEQ ID NO: 3523 - RNA, 21 nt, synthetic construct
  source 1..21: mol_type = other RNA
  modified_base 19^20: mod_base = OTHER; note = phosphorothioate linkage
  modified_base 20^21: mod_base = OTHER; note = phosphorothioate linkage
  modified_base 5: mod_base = OTHER; note = 2-fluoro-modified nucleoside
  modified_base 6: mod_base = OTHER; note = 2-fluoro-modified nucleoside
  modified_base 8: mod_base = OTHER; note = 2-fluoro-modified nucleoside
  modified_base 9: mod_base = OTHER; note = 2-fluoro-modified nucleoside
  modified_base 11: mod_base = OTHER; note = 2-fluoro-modified nucleoside
cattaagagtggaactggatt

SEQ ID NO: 3524 - RNA, 21 nt, synthetic construct
  source 1..21: mol_type = other RNA
  modified_base 19^20: mod_base = OTHER; note = phosphorothioate linkage
  modified_base 20^21: mod_base = OTHER; note = phosphorothioate linkage
  modified_base 6: mod_base = OTHER; note = 2-fluoro-modified nucleoside
  modified_base 7: mod_base = OTHER; note = 2-fluoro-modified nucleoside
  modified_base 9: mod_base = OTHER; note = 2-fluoro-modified nucleoside
  modified_base 10: mod_base = OTHER; note = 2-fluoro-modified nucleoside
acaatgacaatgataagtatt

SEQ ID NO: 3525 - RNA, 21 nt, synthetic construct
  source 1..21: mol_type = other RNA
  modified_base 19^20: mod_base = OTHER; note = phosphorothioate linkage
  modified_base 20^21: mod_base = OTHER; note = phosphorothioate linkage
  modified_base 8: mod_base = OTHER; note = 2-fluoro-modified nucleoside
  modified_base 9: mod_base = OTHER; note = 2-fluoro-modified nucleoside
  modified_base 10: mod_base = OTHER; note = 2-fluoro-modified nucleoside
  modified_base 11: mod_base = OTHER; note = 2-fluoro-modified nucleoside
taagtttgaaggcaactgatt

SEQ ID NO: 3526 - RNA, 21 nt, synthetic construct
  source 1..21: mol_type = other RNA
  modified_base 19^20: mod_base = OTHER; note = phosphorothioate linkage
  modified_base 20^21: mod_base = OTHER; note = phosphorothioate linkage
  modified_base 5: mod_base = OTHER; note = 2-fluoro-modified nucleoside
  modified_base 7: mod_base = OTHER; note = 2-fluoro-modified nucleoside
  modified_base 8: mod_base = OTHER; note = 2-fluoro-modified nucleoside
  modified_base 9: mod_base = OTHER; note = 2-fluoro-modified nucleoside
  modified_base 10: mod_base = OTHER; note = 2-fluoro-modified nucleoside
ctcaatggagtttattacatt

SEQ ID NO: 3527 - RNA, 21 nt, synthetic construct
  source 1..21: mol_type = other RNA
  modified_base 19^20: mod_base = OTHER; note = phosphorothioate linkage
  modified_base 20^21: mod_base = OTHER; note = phosphorothioate linkage
  modified_base 6: mod_base = OTHER; note = 2-fluoro-modified nucleoside
  modified_base 7: mod_base = OTHER; note = 2-fluoro-modified nucleoside
  modified_base 8: mod_base = OTHER; note = 2-fluoro-modified nucleoside
  modified_base 9: mod_base = OTHER; note = 2-fluoro-modified nucleoside
tcaatggagtttattaccatt

SEQ ID NO: 3528 - RNA, 21 nt, synthetic construct
  source 1..21: mol_type = other RNA
  modified_base 19^20: mod_base = OTHER; note = phosphorothioate linkage
  modified_base 20^21: mod_base = OTHER; note = phosphorothioate linkage
  modified_base 6: mod_base = OTHER; note = 2-fluoro-modified nucleoside
  modified_base 9: mod_base = OTHER; note = 2-fluoro-modified nucleoside
agtttattaccaaggtggatt

SEQ ID NO: 3529 - RNA, 21 nt, synthetic construct
  source 1..21: mol_type = other RNA
  modified_base 19^20: mod_base = OTHER; note = phosphorothioate linkage
  modified_base 20^21: mod_base = OTHER; note = phosphorothioate linkage
  modified_base 5: mod_base = OTHER; note = 2-fluoro-modified nucleoside
  modified_base 7: mod_base = OTHER; note = 2-fluoro-modified nucleoside
  modified_base 9: mod_base = OTHER; note = 2-fluoro-modified nucleoside
  modified_base 11: mod_base = OTHER; note = 2-fluoro-modified nucleoside
aaagcatctactcctaatatt

SEQ ID NO: 3530 - RNA, 21 nt, synthetic construct
  source 1..21: mol_type = other RNA
  modified_base 19^20: mod_base = OTHER; note = phosphorothioate linkage
  modified_base 20^21: mod_base = OTHER; note = phosphorothioate linkage
  modified_base 5: mod_base = OTHER; note = 2-fluoro-modified nucleoside
  modified_base 9: mod_base = OTHER; note = 2-fluoro-modified nucleoside
aagcatctactcctaatgatt

SEQ ID NO: 3531 - RNA, 21 nt, synthetic construct
  source 1..21: mol_type = other RNA
  modified_base 19^20: mod_base = OTHER; note = phosphorothioate linkage
  modified_base 20^21: mod_base = OTHER; note = phosphorothioate linkage
  modified_base 6: mod_base = OTHER; note = 2-fluoro-modified nucleoside
  modified_base 8: mod_base = OTHER; note = 2-fluoro-modified nucleoside
  modified_base 7: mod_base = OTHER; note = 2-fluoro-modified nucleoside
  modified_base 9: mod_base = OTHER; note = 2-fluoro-modified nucleoside
  modified_base 10: mod_base = OTHER; note = 2-fluoro-modified nucleoside
atctactcctaatggttaatt

SEQ ID NO: 3532 - RNA, 21 nt, synthetic construct
  source 1..21: mol_type = other RNA
  modified_base 19^20: mod_base = OTHER; note = phosphorothioate linkage
  modified_base 20^21: mod_base = OTHER; note = phosphorothioate linkage
  modified_base 5: mod_base = OTHER; note = 2-fluoro-modified nucleoside
  modified_base 6: mod_base = OTHER; note = 2-fluoro-modified nucleoside
  modified_base 7: mod_base = OTHER; note = 2-fluoro-modified nucleoside
  modified_base 8: mod_base = OTHER; note = 2-fluoro-modified nucleoside
  modified_base 9: mod_base = OTHER; note = 2-fluoro-modified nucleoside
tctactcctaatggttatatt

SEQ ID NO: 3533 - RNA, 21 nt, synthetic construct
  source 1..21: mol_type = other RNA
  modified_base 19^20: mod_base = OTHER; note = phosphorothioate linkage
  modified_base 20^21: mod_base = OTHER; note = phosphorothioate linkage
  modified_base 9: mod_base = OTHER; note = 2-fluoro-modified nucleoside
  modified_base 10: mod_base = OTHER; note = 2-fluoro-modified nucleoside
ctactcctaatggttatgatt

SEQ ID NO: 3534 - RNA, 21 nt, synthetic construct
  source 1..21: mol_type = other RNA
  modified_base 19^20: mod_base = OTHER; note = phosphorothioate linkage
  modified_base 20^21: mod_base = OTHER; note = phosphorothioate linkage
  modified_base 6: mod_base = OTHER; note = 2-fluoro-modified nucleoside
  modified_base 7: mod_base = OTHER; note = 2-fluoro-modified nucleoside
  modified_base 9: mod_base = OTHER; note = 2-fluoro-modified nucleoside
  modified_base 10: mod_base = OTHER; note = 2-fluoro-modified nucleoside
ctcctaatggttatgataatt

SEQ ID NO: 3535 - RNA, 21 nt, synthetic construct
  source 1..21: mol_type = other RNA
  modified_base 19^20: mod_base = OTHER; note = phosphorothioate linkage
  modified_base 20^21: mod_base = OTHER; note = phosphorothioate linkage
  modified_base 6: mod_base = OTHER; note = 2-fluoro-modified nucleoside
  modified_base 9: mod_base = OTHER; note = 2-fluoro-modified nucleoside
  modified_base 10: mod_base = OTHER; note = 2-fluoro-modified nucleoside
cctaatggttatgataatatt

SEQ ID NO: 3536 - RNA, 21 nt, synthetic construct
  source 1..21: mol_type = other RNA
  modified_base 19^20: mod_base = OTHER; note = phosphorothioate linkage
  modified_base 20^21: mod_base = OTHER; note = phosphorothioate linkage
  modified_base 7: mod_base = OTHER; note = 2-fluoro-modified nucleoside
  modified_base 9: mod_base = OTHER; note = 2-fluoro-modified nucleoside
ttatttgggccacttggaatt

SEQ ID NO: 3537 - RNA, 21 nt, synthetic construct
  source 1..21: mol_type = other RNA
  modified_base 19^20: mod_base = OTHER; note = phosphorothioate linkage
  modified_base 20^21: mod_base = OTHER; note = phosphorothioate linkage
  modified_base 7: mod_base = OTHER; note = 2-fluoro-modified nucleoside
  modified_base 9: mod_base = OTHER; note = 2-fluoro-modified nucleoside
accactatgaagataatcatt

SEQ ID NO: 3538 - RNA, 21 nt, synthetic construct
  source 1..21: mol_type = other RNA
  modified_base 19^20: mod_base = OTHER; note = phosphorothioate linkage
  modified_base 20^21: mod_base = OTHER; note = phosphorothioate linkage
  modified_base 2: mod_base = OTHER; note = 2-fluoro-modified nucleoside
  modified_base 4: mod_base = OTHER; note = 2-fluoro-modified nucleoside
  modified_base 6: mod_base = OTHER; note = 2-fluoro-modified nucleoside
  modified_base 8: mod_base = OTHER; note = 2-fluoro-modified nucleoside
  modified_base 10: mod_base = OTHER; note = 2-fluoro-modified nucleoside
  modified_base 12: mod_base = OTHER; note = 2-fluoro-modified nucleoside
  modified_base 14: mod_base = OTHER; note = 2-fluoro-modified nucleoside
  modified_base 16: mod_base = OTHER; note = 2-fluoro-modified nucleoside
  modified_base 18: mod_base = OTHER; note = 2-fluoro-modified nucleoside
taccaactcatgatgtctgtt

SEQ ID NO: 3539 - RNA, 21 nt, synthetic construct
  source 1..21: mol_type = other RNA
  modified_base 19^20: mod_base = OTHER; note = phosphorothioate linkage
  modified_base 20^21: mod_base = OTHER; note = phosphorothioate linkage
  modified_base 2: mod_base = OTHER; note = 2-fluoro-modified nucleoside
  modified_base 4: mod_base = OTHER; note = 2-fluoro-modified nucleoside
  modified_base 6: mod_base = OTHER; note = 2-fluoro-modified nucleoside
  modified_base 8: mod_base = OTHER; note = 2-fluoro-modified nucleoside
  modified_base 10: mod_base = OTHER; note = 2-fluoro-modified nucleoside
  modified_base 12: mod_base = OTHER; note = 2-fluoro-modified nucleoside
  modified_base 14: mod_base = OTHER; note = 2-fluoro-modified nucleoside
  modified_base 16: mod_base = OTHER; note = 2-fluoro-modified nucleoside
  modified_base 18: mod_base = OTHER; note = 2-fluoro-modified nucleoside
ttagagaattaaattccggtt

SEQ ID NO: 3540 - RNA, 21 nt, synthetic construct
  source 1..21: mol_type = other RNA
  modified_base 19^20: mod_base = OTHER; note = phosphorothioate linkage
  modified_base 20^21: mod_base = OTHER; note = phosphorothioate linkage
  modified_base 2: mod_base = OTHER; note = 2-fluoro-modified nucleoside
  modified_base 4: mod_base = OTHER; note = 2-fluoro-modified nucleoside
  modified_base 6: mod_base = OTHER; note = 2-fluoro-modified nucleoside
  modified_base 8: mod_base = OTHER; note = 2-fluoro-modified nucleoside
  modified_base 10: mod_base = OTHER; note = 2-fluoro-modified nucleoside
  modified_base 12: mod_base = OTHER; note = 2-fluoro-modified nucleoside
  modified_base 14: mod_base = OTHER; note = 2-fluoro-modified nucleoside
  modified_base 16: mod_base = OTHER; note = 2-fluoro-modified nucleoside
  modified_base 18: mod_base = OTHER; note = 2-fluoro-modified nucleoside
taagagcatagaagtagagtt

SEQ ID NO: 3541 - RNA, 21 nt, synthetic construct
  source 1..21: mol_type = other RNA
  modified_base 19^20: mod_base = OTHER; note = phosphorothioate linkage
  modified_base 20^21: mod_base = OTHER; note = phosphorothioate linkage
  modified_base 2: mod_base = OTHER; note = 2-fluoro-modified nucleoside
  modified_base 4: mod_base = OTHER; note = 2-fluoro-modified nucleoside
  modified_base 6: mod_base = OTHER; note = 2-fluoro-modified nucleoside
  modified_base 8: mod_base = OTHER; note = 2-fluoro-modified nucleoside
  modified_base 10: mod_base = OTHER; note = 2-fluoro-modified nucleoside
  modified_base 12: mod_base = OTHER; note = 2-fluoro-modified nucleoside
  modified_base 14: mod_base = OTHER; note = 2-fluoro-modified nucleoside
  modified_base 16: mod_base = OTHER; note = 2-fluoro-modified nucleoside
  modified_base 18: mod_base = OTHER; note = 2-fluoro-modified nucleoside
tctttcatctaagatgcagtt

SEQ ID NO: 3542 - RNA, 21 nt, synthetic construct
  source 1..21: mol_type = other RNA
  modified_base 19^20: mod_base = OTHER; note = phosphorothioate linkage
  modified_base 20^21: mod_base = OTHER; note = phosphorothioate linkage
  modified_base 2: mod_base = OTHER; note = 2-fluoro-modified nucleoside
  modified_base 4: mod_base = OTHER; note = 2-fluoro-modified nucleoside
  modified_base 6: mod_base = OTHER; note = 2-fluoro-modified nucleoside
  modified_base 8: mod_base = OTHER; note = 2-fluoro-modified nucleoside
  modified_base 10: mod_base = OTHER; note = 2-fluoro-modified nucleoside
  modified_base 12: mod_base = OTHER; note = 2-fluoro-modified nucleoside
  modified_base 14: mod_base = OTHER; note = 2-fluoro-modified nucleoside
  modified_base 16: mod_base = OTHER; note = 2-fluoro-modified nucleoside
  modified_base 18: mod_base = OTHER; note = 2-fluoro-modified nucleoside
ttctttcatctaagatgcatt

SEQ ID NO: 3543 - RNA, 21 nt, synthetic construct
  source 1..21: mol_type = other RNA
  modified_base 19^20: mod_base = OTHER; note = phosphorothioate linkage
  modified_base 20^21: mod_base = OTHER; note = phosphorothioate linkage
  modified_base 2: mod_base = OTHER; note = 2-fluoro-modified nucleoside
  modified_base 4: mod_base = OTHER; note = 2-fluoro-modified nucleoside
  modified_base 6: mod_base = OTHER; note = 2-fluoro-modified nucleoside
  modified_base 8: mod_base = OTHER; note = 2-fluoro-modified nucleoside
  modified_base 10: mod_base = OTHER; note = 2-fluoro-modified nucleoside
  modified_base 12: mod_base = OTHER; note = 2-fluoro-modified nucleoside
  modified_base 14: mod_base = OTHER; note = 2-fluoro-modified nucleoside
  modified_base 16: mod_base = OTHER; note = 2-fluoro-modified nucleoside
  modified_base 18: mod_base = OTHER; note = 2-fluoro-modified nucleoside
tatctttcatctaagatgctt

SEQ ID NO: 3544 - RNA, 21 nt, synthetic construct
  source 1..21: mol_type = other RNA
  modified_base 2: mod_base = OTHER; note = 2-fluoro-modified nucleoside
  modified_base 4: mod_base = OTHER; note = 2-fluoro-modified nucleoside
  modified_base 6: mod_base = OTHER; note = 2-fluoro-modified nucleoside
  modified_base 8: mod_base = OTHER; note = 2-fluoro-modified nucleoside
  modified_base 10: mod_base = OTHER; note = 2-fluoro-modified nucleoside
  modified_base 12: mod_base = OTHER; note = 2-fluoro-modified nucleoside
  modified_base 14: mod_base = OTHER; note = 2-fluoro-modified nucleoside
  modified_base 16: mod_base = OTHER; note = 2-fluoro-modified nucleoside
  modified_base 18: mod_base = OTHER; note = 2-fluoro-modified nucleoside
  modified_base 1^2: mod_base = OTHER; note = phosphorothioate linkage
  modified_base 2^3: mod_base = OTHER; note = phosphorothioate linkage
  modified_base 19^20: mod_base = OTHER; note = phosphorothioate linkage
  modified_base 20^21: mod_base = OTHER; note = phosphorothioate linkage
tcgaatctttcatctaagatt

SEQ ID NO: 3545 - RNA, 21 nt, synthetic construct
  source 1..21: mol_type = other RNA
  modified_base 19^20: mod_base = OTHER; note = phosphorothioate linkage
  modified_base 20^21: mod_base = OTHER; note = phosphorothioate linkage
  modified_base 2: mod_base = OTHER; note = 2-fluoro-modified nucleoside
  modified_base 4: mod_base = OTHER; note = 2-fluoro-modified nucleoside
  modified_base 6: mod_base = OTHER; note = 2-fluoro-modified nucleoside
  modified_base 8: mod_base = OTHER; note = 2-fluoro-modified nucleoside
  modified_base 10: mod_base = OTHER; note = 2-fluoro-modified nucleoside
  modified_base 12: mod_base = OTHER; note = 2-fluoro-modified nucleoside
  modified_base 14: mod_base = OTHER; note = 2-fluoro-modified nucleoside
  modified_base 16: mod_base = OTHER; note = 2-fluoro-modified nucleoside
  modified_base 18: mod_base = OTHER; note = 2-fluoro-modified nucleoside
taccgaatctttcatctaatt

SEQ ID NO: 3546 - RNA, 21 nt, synthetic construct
  source 1..21: mol_type = other RNA
  modified_base 19^20: mod_base = OTHER; note = phosphorothioate linkage
  modified_base 20^21: mod_base = OTHER; note = phosphorothioate linkage
  modified_base 2: mod_base = OTHER; note = 2-fluoro-modified nucleoside
  modified_base 4: mod_base = OTHER; note = 2-fluoro-modified nucleoside
  modified_base 6: mod_base = OTHER; note = 2-fluoro-modified nucleoside
  modified_base 8: mod_base = OTHER; note = 2-fluoro-modified nucleoside
  modified_base 10: mod_base = OTHER; note = 2-fluoro-modified nucleoside
  modified_base 12: mod_base = OTHER; note = 2-fluoro-modified nucleoside
  modified_base 14: mod_base = OTHER; note = 2-fluoro-modified nucleoside
  modified_base 16: mod_base = OTHER; note = 2-fluoro-modified nucleoside
  modified_base 18: mod_base = OTHER; note = 2-fluoro-modified nucleoside
ttaccgaatctttcatctatt

SEQ ID NO: 3547 - RNA, 21 nt, synthetic construct
  source 1..21: mol_type = other RNA
  modified_base 19^20: mod_base = OTHER; note = phosphorothioate linkage
  modified_base 20^21: mod_base = OTHER; note = phosphorothioate linkage
  modified_base 2: mod_base = OTHER; note = 2-fluoro-modified nucleoside
  modified_base 4: mod_base = OTHER; note = 2-fluoro-modified nucleoside
  modified_base 6: mod_base = OTHER; note = 2-fluoro-modified nucleoside
  modified_base 8: mod_base = OTHER; note = 2-fluoro-modified nucleoside
  modified_base 10: mod_base = OTHER; note = 2-fluoro-modified nucleoside
  modified_base 12: mod_base = OTHER; note = 2-fluoro-modified nucleoside
  modified_base 14: mod_base = OTHER; note = 2-fluoro-modified nucleoside
  modified_base 16: mod_base = OTHER; note = 2-fluoro-modified nucleoside
  modified_base 18: mod_base = OTHER; note = 2-fluoro-modified nucleoside
tctaccgaatctttcatcttt

SEQ ID NO: 3548 - RNA, 21 nt, synthetic construct
  source 1..21: mol_type = other RNA
  modified_base 19^20: mod_base = OTHER; note = phosphorothioate linkage
  modified_base 20^21: mod_base = OTHER; note = phosphorothioate linkage
  modified_base 2: mod_base = OTHER; note = 2-fluoro-modified nucleoside
  modified_base 4: mod_base = OTHER; note = 2-fluoro-modified nucleoside
  modified_base 6: mod_base = OTHER; note = 2-fluoro-modified nucleoside
  modified_base 8: mod_base = OTHER; note = 2-fluoro-modified nucleoside
  modified_base 10: mod_base = OTHER; note = 2-fluoro-modified nucleoside
  modified_base 12: mod_base = OTHER; note = 2-fluoro-modified nucleoside
  modified_base 14: mod_base = OTHER; note = 2-fluoro-modified nucleoside
  modified_base 16: mod_base = OTHER; note = 2-fluoro-modified nucleoside
  modified_base 18: mod_base = OTHER; note = 2-fluoro-modified nucleoside
tactaccgaatctttcatctt

SEQ ID NO: 3549 - RNA, 21 nt, synthetic construct
  source 1..21: mol_type = other RNA
  modified_base 19^20: mod_base = OTHER; note = phosphorothioate linkage
  modified_base 20^21: mod_base = OTHER; note = phosphorothioate linkage
  modified_base 2: mod_base = OTHER; note = 2-fluoro-modified nucleoside
  modified_base 4: mod_base = OTHER; note = 2-fluoro-modified nucleoside
  modified_base 6: mod_base = OTHER; note = 2-fluoro-modified nucleoside
  modified_base 8: mod_base = OTHER; note = 2-fluoro-modified nucleoside
  modified_base 10: mod_base = OTHER; note = 2-fluoro-modified nucleoside
  modified_base 12: mod_base = OTHER; note = 2-fluoro-modified nucleoside
  modified_base 14: mod_base = OTHER; note = 2-fluoro-modified nucleoside
  modified_base 16: mod_base = OTHER; note = 2-fluoro-modified nucleoside
  modified_base 18: mod_base = OTHER; note = 2-fluoro-modified nucleoside
ttaactaccgaatctttcatt

SEQ ID NO: 3550 - RNA, 21 nt, synthetic construct
  source 1..21: mol_type = other RNA
  modified_base 19^20: mod_base = OTHER; note = phosphorothioate linkage
  modified_base 20^21: mod_base = OTHER; note = phosphorothioate linkage
  modified_base 2: mod_base = OTHER; note = 2-fluoro-modified nucleoside
  modified_base 4: mod_base = OTHER; note = 2-fluoro-modified nucleoside
  modified_base 6: mod_base = OTHER; note = 2-fluoro-modified nucleoside
  modified_base 8: mod_base = OTHER; note = 2-fluoro-modified nucleoside
  modified_base 10: mod_base = OTHER; note = 2-fluoro-modified nucleoside
  modified_base 12: mod_base = OTHER; note = 2-fluoro-modified nucleoside
  modified_base 14: mod_base = OTHER; note = 2-fluoro-modified nucleoside
  modified_base 16: mod_base = OTHER; note = 2-fluoro-modified nucleoside
  modified_base 18: mod_base = OTHER; note = 2-fluoro-modified nucleoside
tataactaccgaatctttctt

SEQ ID NO: 3551 - RNA, 21 nt, synthetic construct
  source 1..21: mol_type = other RNA
  modified_base 19^20: mod_base = OTHER; note = phosphorothioate linkage
  modified_base 20^21: mod_base = OTHER; note = phosphorothioate linkage
  modified_base 2: mod_base = OTHER; note = 2-fluoro-modified nucleoside
  modified_base 4: mod_base = OTHER; note = 2-fluoro-modified nucleoside
  modified_base 6: mod_base = OTHER; note = 2-fluoro-modified nucleoside
  modified_base 8: mod_base = OTHER; note = 2-fluoro-modified nucleoside
  modified_base 10: mod_base = OTHER; note = 2-fluoro-modified nucleoside
  modified_base 12: mod_base = OTHER; note = 2-fluoro-modified nucleoside
  modified_base 14: mod_base = OTHER; note = 2-fluoro-modified nucleoside
  modified_base 16: mod_base = OTHER; note = 2-fluoro-modified nucleoside
  modified_base 18: mod_base = OTHER; note = 2-fluoro-modified nucleoside
tgacaataactaccgaatctt

SEQ ID NO: 3552 - RNA, 21 nt, synthetic construct
  source 1..21: mol_type = other RNA
  modified_base 19^20: mod_base = OTHER; note = phosphorothioate linkage
  modified_base 20^21: mod_base = OTHER; note = phosphorothioate linkage
  modified_base 2: mod_base = OTHER; note = 2-fluoro-modified nucleoside
  modified_base 4: mod_base = OTHER; note = 2-fluoro-modified nucleoside
  modified_base 6: mod_base = OTHER; note = 2-fluoro-modified nucleoside
  modified_base 8: mod_base = OTHER; note = 2-fluoro-modified nucleoside
  modified_base 10: mod_base = OTHER; note = 2-fluoro-modified nucleoside
  modified_base 12: mod_base = OTHER; note = 2-fluoro-modified nucleoside
  modified_base 14: mod_base = OTHER; note = 2-fluoro-modified nucleoside
  modified_base 16: mod_base = OTHER; note = 2-fluoro-modified nucleoside
  modified_base 18: mod_base = OTHER; note = 2-fluoro-modified nucleoside
tgttggacaataactaccgtt

SEQ ID NO: 3553 - RNA, 21 nt, synthetic construct
  source 1..21: mol_type = other RNA
  modified_base 19^20: mod_base = OTHER; note = phosphorothioate linkage
  modified_base 20^21: mod_base = OTHER; note = phosphorothioate linkage
  modified_base 2: mod_base = OTHER; note = 2-fluoro-modified nucleoside
  modified_base 4: mod_base = OTHER; note = 2-fluoro-modified nucleoside
  modified_base 6: mod_base = OTHER; note = 2-fluoro-modified nucleoside
  modified_base 8: mod_base = OTHER; note = 2-fluoro-modified nucleoside
  modified_base 10: mod_base = OTHER; note = 2-fluoro-modified nucleoside
  modified_base 12: mod_base = OTHER; note = 2-fluoro-modified nucleoside
  modified_base 14: mod_base = OTHER; note = 2-fluoro-modified nucleoside
  modified_base 16: mod_base = OTHER; note = 2-fluoro-modified nucleoside
  modified_base 18: mod_base = OTHER; note = 2-fluoro-modified nucleoside
ttagttggacaataactactt

SEQ ID NO: 3554 - RNA, 21 nt, synthetic construct
  source 1..21: mol_type = other RNA
  modified_base 19^20: mod_base = OTHER; note = phosphorothioate linkage
  modified_base 20^21: mod_base = OTHER; note = phosphorothioate linkage
  modified_base 2: mod_base = OTHER; note = 2-fluoro-modified nucleoside
  modified_base 4: mod_base = OTHER; note = 2-fluoro-modified nucleoside
  modified_base 6: mod_base = OTHER; note = 2-fluoro-modified nucleoside
  modified_base 8: mod_base = OTHER; note = 2-fluoro-modified nucleoside
  modified_base 10: mod_base = OTHER; note = 2-fluoro-modified nucleoside
  modified_base 12: mod_base = OTHER; note = 2-fluoro-modified nucleoside
  modified_base 14: mod_base = OTHER; note = 2-fluoro-modified nucleoside
  modified_base 16: mod_base = OTHER; note = 2-fluoro-modified nucleoside
  modified_base 18: mod_base = OTHER; note = 2-fluoro-modified nucleoside
tggtagttggacaataacttt

SEQ ID NO: 3555 - RNA, 21 nt, synthetic construct
  source 1..21: mol_type = other RNA
  modified_base 19^20: mod_base = OTHER; note = phosphorothioate linkage
  modified_base 20^21: mod_base = OTHER; note = phosphorothioate linkage
  modified_base 2: mod_base = OTHER; note = 2-fluoro-modified nucleoside
  modified_base 4: mod_base = OTHER; note = 2-fluoro-modified nucleoside
  modified_base 6: mod_base = OTHER; note = 2-fluoro-modified nucleoside
  modified_base 8: mod_base = OTHER; note = 2-fluoro-modified nucleoside
  modified_base 10: mod_base = OTHER; note = 2-fluoro-modified nucleoside
  modified_base 12: mod_base = OTHER; note = 2-fluoro-modified nucleoside
  modified_base 14: mod_base = OTHER; note = 2-fluoro-modified nucleoside
  modified_base 16: mod_base = OTHER; note = 2-fluoro-modified nucleoside
  modified_base 18: mod_base = OTHER; note = 2-fluoro-modified nucleoside
tataagtagacaggaaatctt

SEQ ID NO: 3556 - RNA, 21 nt, synthetic construct
  source 1..21: mol_type = other RNA
  modified_base 19^20: mod_base = OTHER; note = phosphorothioate linkage
  modified_base 20^21: mod_base = OTHER; note = phosphorothioate linkage
  modified_base 2: mod_base = OTHER; note = 2-fluoro-modified nucleoside
  modified_base 4: mod_base = OTHER; note = 2-fluoro-modified nucleoside
  modified_base 6: mod_base = OTHER; note = 2-fluoro-modified nucleoside
  modified_base 8: mod_base = OTHER; note = 2-fluoro-modified nucleoside
  modified_base 10: mod_base = OTHER; note = 2-fluoro-modified nucleoside
  modified_base 12: mod_base = OTHER; note = 2-fluoro-modified nucleoside
  modified_base 14: mod_base = OTHER; note = 2-fluoro-modified nucleoside
  modified_base 16: mod_base = OTHER; note = 2-fluoro-modified nucleoside
  modified_base 18: mod_base = OTHER; note = 2-O-methyl modified nucleoside
  modified_base 18: mod_base = OTHER; note = 2-fluoro-modified nucleoside
tgataagtagacaggaaattt

SEQ ID NO: 3557 - RNA, 21 nt, synthetic construct
  source 1..21: mol_type = other RNA
  modified_base 19^20: mod_base = OTHER; note = phosphorothioate linkage
  modified_base 20^21: mod_base = OTHER; note = phosphorothioate linkage
  modified_base 2: mod_base = OTHER; note = 2-fluoro-modified nucleoside
  modified_base 4: mod_base = OTHER; note = 2-fluoro-modified nucleoside
  modified_base 6: mod_base = OTHER; note = 2-fluoro-modified nucleoside
  modified_base 8: mod_base = OTHER; note = 2-fluoro-modified nucleoside
  modified_base 10: mod_base = OTHER; note = 2-fluoro-modified nucleoside
  modified_base 12: mod_base = OTHER; note = 2-fluoro-modified nucleoside
  modified_base 14: mod_base = OTHER; note = 2-fluoro-modified nucleoside
  modified_base 16: mod_base = OTHER; note = 2-fluoro-modified nucleoside
  modified_base 18: mod_base = OTHER; note = 2-fluoro-modified nucleoside
ttgtagatccttgtctacttt

SEQ ID NO: 3558 - RNA, 21 nt, synthetic construct
  source 1..21: mol_type = other RNA
  modified_base 19^20: mod_base = OTHER; note = phosphorothioate linkage
  modified_base 20^21: mod_base = OTHER; note = phosphorothioate linkage
  modified_base 2: mod_base = OTHER; note = 2-fluoro-modified nucleoside
  modified_base 4: mod_base = OTHER; note = 2-fluoro-modified nucleoside
  modified_base 6: mod_base = OTHER; note = 2-fluoro-modified nucleoside
  modified_base 8: mod_base = OTHER; note = 2-fluoro-modified nucleoside
  modified_base 10: mod_base = OTHER; note = 2-fluoro-modified nucleoside
  modified_base 12: mod_base = OTHER; note = 2-fluoro-modified nucleoside
  modified_base 14: mod_base = OTHER; note = 2-fluoro-modified nucleoside
  modified_base 16: mod_base = OTHER; note = 2-fluoro-modified nucleoside
  modified_base 18: mod_base = OTHER; note = 2-fluoro-modified nucleoside
ttccaaagactgtagatcctt

SEQ ID NO: 3559 - RNA, 21 nt, synthetic construct
  source 1..21: mol_type = other RNA
  modified_base 19^20: mod_base = OTHER; note = phosphorothioate linkage
  modified_base 20^21: mod_base = OTHER; note = phosphorothioate linkage
  modified_base 2: mod_base = OTHER; note = 2-fluoro-modified nucleoside
  modified_base 4: mod_base = OTHER; note = 2-fluoro-modified nucleoside
  modified_base 6: mod_base = OTHER; note = 2-fluoro-modified nucleoside
  modified_base 8: mod_base = OTHER; note = 2-fluoro-modified nucleoside
  modified_base 10: mod_base = OTHER; note = 2-fluoro-modified nucleoside
  modified_base 12: mod_base = OTHER; note = 2-fluoro-modified nucleoside
  modified_base 14: mod_base = OTHER; note = 2-fluoro-modified nucleoside
  modified_base 16: mod_base = OTHER; note = 2-fluoro-modified nucleoside
  modified_base 18: mod_base = OTHER; note = 2-fluoro-modified nucleoside
tcttccaaagactgtagattt

SEQ ID NO: 3560 - RNA, 21 nt, synthetic construct
  source 1..21: mol_type = other RNA
  modified_base 19^20: mod_base = OTHER; note = phosphorothioate linkage
  modified_base 20^21: mod_base = OTHER; note = phosphorothioate linkage
  modified_base 2: mod_base = OTHER; note = 2-fluoro-modified nucleoside
  modified_base 4: mod_base = OTHER; note = 2-fluoro-modified nucleoside
  modified_base 6: mod_base = OTHER; note = 2-fluoro-modified nucleoside
  modified_base 10: mod_base = OTHER; note = 2-fluoro-modified nucleoside
  modified_base 12: mod_base = OTHER; note = 2-fluoro-modified nucleoside
  modified_base 16: mod_base = OTHER; note = 2-fluoro-modified nucleoside
  modified_base 18: mod_base = OTHER; note = 2-fluoro-modified nucleoside
ttgatgtaagatgtcttcctt

SEQ ID NO: 3561 - RNA, 21 nt, synthetic construct
  source 1..21: mol_type = other RNA
  modified_base 19^20: mod_base = OTHER; note = phosphorothioate linkage
  modified_base 20^21: mod_base = OTHER; note = phosphorothioate linkage
  modified_base 2: mod_base = OTHER; note = 2-fluoro-modified nucleoside
  modified_base 4: mod_base = OTHER; note = 2-fluoro-modified nucleoside
  modified_base 6: mod_base = OTHER; note = 2-fluoro-modified nucleoside
  modified_base 8: mod_base = OTHER; note = 2-fluoro-modified nucleoside
  modified_base 10: mod_base = OTHER; note = 2-fluoro-modified nucleoside
  modified_base 12: mod_base = OTHER; note = 2-fluoro-modified nucleoside
  modified_base 14: mod_base = OTHER; note = 2-fluoro-modified nucleoside
  modified_base 16: mod_base = OTHER; note = 2-fluoro-modified nucleoside
  modified_base 18: mod_base = OTHER; note = 2-fluoro-modified nucleoside
tcttgatgtaagatgtctttt

SEQ ID NO: 3562 - RNA, 21 nt, synthetic construct
  source 1..21: mol_type = other RNA
  modified_base 19^20: mod_base = OTHER; note = phosphorothioate linkage
  modified_base 20^21: mod_base = OTHER; note = phosphorothioate linkage
  modified_base 2: mod_base = OTHER; note = 2-fluoro-modified nucleoside
  modified_base 4: mod_base = OTHER; note = 2-fluoro-modified nucleoside
  modified_base 6: mod_base = OTHER; note = 2-fluoro-modified nucleoside
  modified_base 8: mod_base = OTHER; note = 2-fluoro-modified nucleoside
  modified_base 10: mod_base = OTHER; note = 2-fluoro-modified nucleoside
  modified_base 12: mod_base = OTHER; note = 2-fluoro-modified nucleoside
  modified_base 14: mod_base = OTHER; note = 2-fluoro-modified nucleoside
  modified_base 16: mod_base = OTHER; note = 2-fluoro-modified nucleoside
  modified_base 18: mod_base = OTHER; note = 2-fluoro-modified nucleoside
tgattgcttttatcagctgtt

SEQ ID NO: 3563 - RNA, 21 nt, synthetic construct
  source 1..21: mol_type = other RNA
  modified_base 19^20: mod_base = OTHER; note = phosphorothioate linkage
  modified_base 20^21: mod_base = OTHER; note = phosphorothioate linkage
  modified_base 2: mod_base = OTHER; note = 2-fluoro-modified nucleoside
  modified_base 4: mod_base = OTHER; note = 2-fluoro-modified nucleoside
  modified_base 6: mod_base = OTHER; note = 2-fluoro-modified nucleoside
  modified_base 10: mod_base = OTHER; note = 2-fluoro-modified nucleoside
  modified_base 12: mod_base = OTHER; note = 2-fluoro-modified nucleoside
  modified_base 14: mod_base = OTHER; note = 2-fluoro-modified nucleoside
  modified_base 16: mod_base = OTHER; note = 2-fluoro-modified nucleoside
  modified_base 18: mod_base = OTHER; note = 2-fluoro-modified nucleoside
tgttggattgcttttatcatt

SEQ ID NO: 3564 - RNA, 21 nt, synthetic construct
  source 1..21: mol_type = other RNA
  modified_base 19^20: mod_base = OTHER; note = phosphorothioate linkage
  modified_base 20^21: mod_base = OTHER; note = phosphorothioate linkage
  modified_base 2: mod_base = OTHER; note = 2-fluoro-modified nucleoside
  modified_base 4: mod_base = OTHER; note = 2-fluoro-modified nucleoside
  modified_base 6: mod_base = OTHER; note = 2-fluoro-modified nucleoside
  modified_base 8: mod_base = OTHER; note = 2-fluoro-modified nucleoside
  modified_base 10: mod_base = OTHER; note = 2-fluoro-modified nucleoside
  modified_base 12: mod_base = OTHER; note = 2-fluoro-modified nucleoside
  modified_base 14: mod_base = OTHER; note = 2-fluoro-modified nucleoside
  modified_base 16: mod_base = OTHER; note = 2-fluoro-modified nucleoside
  modified_base 18: mod_base = OTHER; note = 2-fluoro-modified nucleoside
ttgatgattcatcaggatttt

SEQ ID NO: 3565 - RNA, 21 nt, synthetic construct
  source 1..21: mol_type = other RNA
  modified_base 19^20: mod_base = OTHER; note = phosphorothioate linkage
  modified_base 20^21: mod_base = OTHER; note = phosphorothioate linkage
  modified_base 2: mod_base = OTHER; note = 2-fluoro-modified nucleoside
  modified_base 4: mod_base = OTHER; note = 2-fluoro-modified nucleoside
  modified_base 6: mod_base = OTHER; note = 2-fluoro-modified nucleoside
  modified_base 8: mod_base = OTHER; note = 2-fluoro-modified nucleoside
  modified_base 10: mod_base = OTHER; note = 2-fluoro-modified nucleoside
  modified_base 12: mod_base = OTHER; note = 2-fluoro-modified nucleoside
  modified_base 14: mod_base = OTHER; note = 2-fluoro-modified nucleoside
  modified_base 16: mod_base = OTHER; note = 2-fluoro-modified nucleoside
  modified_base 18: mod_base = OTHER; note = 2-fluoro-modified nucleoside
tggttttgatgattcatcatt

SEQ ID NO: 3566 - RNA, 21 nt, synthetic construct
  source 1..21: mol_type = other RNA
  modified_base 19^20: mod_base = OTHER; note = phosphorothioate linkage
  modified_base 20^21: mod_base = OTHER; note = phosphorothioate linkage
  modified_base 2: mod_base = OTHER; note = 2-fluoro-modified nucleoside
  modified_base 4: mod_base = OTHER; note = 2-fluoro-modified nucleoside
  modified_base 6: mod_base = OTHER; note = 2-fluoro-modified nucleoside
  modified_base 8: mod_base = OTHER; note = 2-fluoro-modified nucleoside
  modified_base 10: mod_base = OTHER; note = 2-fluoro-modified nucleoside
  modified_base 12: mod_base = OTHER; note = 2-fluoro-modified nucleoside
  modified_base 14: mod_base = OTHER; note = 2-fluoro-modified nucleoside
  modified_base 16: mod_base = OTHER; note = 2-fluoro-modified nucleoside
  modified_base 18: mod_base = OTHER; note = 2-fluoro-modified nucleoside
ttctaacattttcctggactt

SEQ ID NO: 3567 - RNA, 21 nt, synthetic construct
  source 1..21: mol_type = other RNA
  modified_base 19^20: mod_base = OTHER; note = phosphorothioate linkage
  modified_base 20^21: mod_base = OTHER; note = phosphorothioate linkage
  modified_base 2: mod_base = OTHER; note = 2-fluoro-modified nucleoside
  modified_base 4: mod_base = OTHER; note = 2-fluoro-modified nucleoside
  modified_base 6: mod_base = OTHER; note = 2-fluoro-modified nucleoside
  modified_base 10: mod_base = OTHER; note = 2-fluoro-modified nucleoside
  modified_base 12: mod_base = OTHER; note = 2-fluoro-modified nucleoside
  modified_base 14: mod_base = OTHER; note = 2-fluoro-modified nucleoside
  modified_base 16: mod_base = OTHER; note = 2-fluoro-modified nucleoside
  modified_base 18: mod_base = OTHER; note = 2-fluoro-modified nucleoside
tttcccagtgatatcatggtt

SEQ ID NO: 3568 - RNA, 21 nt, synthetic construct
  source 1..21: mol_type = other RNA
  modified_base 19^20: mod_base = OTHER; note = phosphorothioate linkage
  modified_base 20^21: mod_base = OTHER; note = phosphorothioate linkage
  modified_base 2: mod_base = OTHER; note = 2-fluoro-modified nucleoside
  modified_base 4: mod_base = OTHER; note = 2-fluoro-modified nucleoside
  modified_base 6: mod_base = OTHER; note = 2-fluoro-modified nucleoside
  modified_base 8: mod_base = OTHER; note = 2-fluoro-modified nucleoside
  modified_base 10: mod_base = OTHER; note = 2-fluoro-modified nucleoside
  modified_base 12: mod_base = OTHER; note = 2-fluoro-modified nucleoside
  modified_base 14: mod_base = OTHER; note = 2-fluoro-modified nucleoside
  modified_base 16: mod_base = OTHER; note = 2-fluoro-modified nucleoside
  modified_base 18: mod_base = OTHER; note = 2-fluoro-modified nucleoside
tcaatgtcttgacaatctttt

SEQ ID NO: 3569 - RNA, 21 nt, synthetic construct
  source 1..21: mol_type = other RNA
  modified_base 19^20: mod_base = OTHER; note = phosphorothioate linkage
  modified_base 20^21: mod_base = OTHER; note = phosphorothioate linkage
  modified_base 2: mod_base = OTHER; note = 2-fluoro-modified nucleoside
  modified_base 4: mod_base = OTHER; note = 2-fluoro-modified nucleoside
  modified_base 6: mod_base = OTHER; note = 2-fluoro-modified nucleoside
  modified_base 8: mod_base = OTHER; note = 2-fluoro-modified nucleoside
  modified_base 10: mod_base = OTHER; note = 2-fluoro-modified nucleoside
  modified_base 12: mod_base = OTHER; note = 2-fluoro-modified nucleoside
  modified_base 14: mod_base = OTHER; note = 2-fluoro-modified nucleoside
  modified_base 16: mod_base = OTHER; note = 2-fluoro-modified nucleoside
  modified_base 18: mod_base = OTHER; note = 2-fluoro-modified nucleoside
ttaaagtaaagcccgctcttt

SEQ ID NO: 3570 - RNA, 21 nt, synthetic construct
  source 1..21: mol_type = other RNA
  modified_base 19^20: mod_base = OTHER; note = phosphorothioate linkage
  modified_base 20^21: mod_base = OTHER; note = phosphorothioate linkage
  modified_base 2: mod_base = OTHER; note = 2-fluoro-modified nucleoside
  modified_base 4: mod_base = OTHER; note = 2-fluoro-modified nucleoside
  modified_base 6: mod_base = OTHER; note = 2-fluoro-modified nucleoside
  modified_base 8: mod_base = OTHER; note = 2-fluoro-modified nucleoside
  modified_base 10: mod_base = OTHER; note = 2-fluoro-modified nucleoside
  modified_base 12: mod_base = OTHER; note = 2-fluoro-modified nucleoside
  modified_base 14: mod_base = OTHER; note = 2-fluoro-modified nucleoside
  modified_base 16: mod_base = OTHER; note = 2-fluoro-modified nucleoside
  modified_base 18: mod_base = OTHER; note = 2-fluoro-modified nucleoside
tttagctttcagaggtttatt

SEQ ID NO: 3571 - RNA, 21 nt, synthetic construct
  source 1..21: mol_type = other RNA
  modified_base 19^20: mod_base = OTHER; note = phosphorothioate linkage
  modified_base 20^21: mod_base = OTHER; note = phosphorothioate linkage
  modified_base 2: mod_base = OTHER; note = 2-fluoro-modified nucleoside
  modified_base 4: mod_base = OTHER; note = 2-fluoro-modified nucleoside
  modified_base 6: mod_base = OTHER; note = 2-fluoro-modified nucleoside
  modified_base 8: mod_base = OTHER; note = 2-fluoro-modified nucleoside
  modified_base 10: mod_base = OTHER; note = 2-fluoro-modified nucleoside
  modified_base 12: mod_base = OTHER; note = 2-fluoro-modified nucleoside
  modified_base 14: mod_base = OTHER; note = 2-fluoro-modified nucleoside
  modified_base 16: mod_base = OTHER; note = 2-fluoro-modified nucleoside
  modified_base 18: mod_base = OTHER; note = 2-fluoro-modified nucleoside
tgaatccagtttttcttgatt

SEQ ID NO: 3572 - RNA, 21 nt, synthetic construct
  source 1..21: mol_type = other RNA
  modified_base 19^20: mod_base = OTHER; note = phosphorothioate linkage
  modified_base 20^21: mod_base = OTHER; note = phosphorothioate linkage
  modified_base 2: mod_base = OTHER; note = 2-fluoro-modified nucleoside
  modified_base 4: mod_base = OTHER; note = 2-fluoro-modified nucleoside
  modified_base 6: mod_base = OTHER; note = 2-fluoro-modified nucleoside
  modified_base 8: mod_base = OTHER; note = 2-fluoro-modified nucleoside
  modified_base 10: mod_base = OTHER; note = 2-fluoro-modified nucleoside
  modified_base 12: mod_base = OTHER; note = 2-fluoro-modified nucleoside
  modified_base 14: mod_base = OTHER; note = 2-fluoro-modified nucleoside
  modified_base 16: mod_base = OTHER; note = 2-fluoro-modified nucleoside
  modified_base 18: mod_base = OTHER; note = 2-fluoro-modified nucleoside
tattgaatccagtttttcttt

SEQ ID NO: 3573 - RNA, 21 nt, synthetic construct
  source 1..21: mol_type = other RNA
  modified_base 19^20: mod_base = OTHER; note = phosphorothioate linkage
  modified_base 20^21: mod_base = OTHER; note = phosphorothioate linkage
  modified_base 2: mod_base = OTHER; note = 2-fluoro-modified nucleoside
  modified_base 4: mod_base = OTHER; note = 2-fluoro-modified nucleoside
  modified_base 6: mod_base = OTHER; note = 2-fluoro-modified nucleoside
  modified_base 8: mod_base = OTHER; note = 2-fluoro-modified nucleoside
  modified_base 10: mod_base = OTHER; note = 2-fluoro-modified nucleoside
  modified_base 12: mod_base = OTHER; note = 2-fluoro-modified nucleoside
  modified_base 14: mod_base = OTHER; note = 2-fluoro-modified nucleoside
  modified_base 16: mod_base = OTHER; note = 2-fluoro-modified nucleoside
  modified_base 18: mod_base = OTHER; note = 2-fluoro-modified nucleoside
tatgaatcttctcatttcctt

SEQ ID NO: 3574 - RNA, 21 nt, synthetic construct
  source 1..21: mol_type = other RNA
  modified_base 19^20: mod_base = OTHER; note = phosphorothioate linkage
  modified_base 20^21: mod_base = OTHER; note = phosphorothioate linkage
  modified_base 2: mod_base = OTHER; note = 2-fluoro-modified nucleoside
  modified_base 4: mod_base = OTHER; note = 2-fluoro-modified nucleoside
  modified_base 6: mod_base = OTHER; note = 2-fluoro-modified nucleoside
  modified_base 8: mod_base = OTHER; note = 2-fluoro-modified nucleoside
  modified_base 10: mod_base = OTHER; note = 2-fluoro-modified nucleoside
  modified_base 12: mod_base = OTHER; note = 2-fluoro-modified nucleoside
  modified_base 14: mod_base = OTHER; note = 2-fluoro-modified nucleoside
  modified_base 16: mod_base = OTHER; note = 2-fluoro-modified nucleoside
  modified_base 18: mod_base = OTHER; note = 2-fluoro-modified nucleoside
tcttatcaaatgaatcttctt

SEQ ID NO: 3575 - RNA, 21 nt, synthetic construct
  source 1..21: mol_type = other RNA
  modified_base 19^20: mod_base = OTHER; note = phosphorothioate linkage
  modified_base 20^21: mod_base = OTHER; note = phosphorothioate linkage
  modified_base 2: mod_base = OTHER; note = 2-fluoro-modified nucleoside
  modified_base 4: mod_base = OTHER; note = 2-fluoro-modified nucleoside
  modified_base 6: mod_base = OTHER; note = 2-fluoro-modified nucleoside
  modified_base 8: mod_base = OTHER; note = 2-fluoro-modified nucleoside
  modified_base 10: mod_base = OTHER; note = 2-fluoro-modified nucleoside
  modified_base 12: mod_base = OTHER; note = 2-fluoro-modified nucleoside
  modified_base 14: mod_base = OTHER; note = 2-fluoro-modified nucleoside
  modified_base 16: mod_base = OTHER; note = 2-fluoro-modified nucleoside
  modified_base 18: mod_base = OTHER; note = 2-fluoro-modified nucleoside
ttgcttatcaaatgaatcttt

SEQ ID NO: 3576 - RNA, 21 nt, synthetic construct
  source 1..21: mol_type = other RNA
  modified_base 19^20: mod_base = OTHER; note = phosphorothioate linkage
  modified_base 20^21: mod_base = OTHER; note = phosphorothioate linkage
  modified_base 2: mod_base = OTHER; note = 2-fluoro-modified nucleoside
  modified_base 4: mod_base = OTHER; note = 2-fluoro-modified nucleoside
  modified_base 6: mod_base = OTHER; note = 2-fluoro-modified nucleoside
  modified_base 8: mod_base = OTHER; note = 2-fluoro-modified nucleoside
  modified_base 10: mod_base = OTHER; note = 2-fluoro-modified nucleoside
  modified_base 12: mod_base = OTHER; note = 2-fluoro-modified nucleoside
  modified_base 14: mod_base = OTHER; note = 2-fluoro-modified nucleoside
  modified_base 16: mod_base = OTHER; note = 2-fluoro-modified nucleoside
  modified_base 18: mod_base = OTHER; note = 2-fluoro-modified nucleoside
tccagttccactcttaatgtt

SEQ ID NO: 3577 - RNA, 21 nt, synthetic construct
  source 1..21: mol_type = other RNA
  modified_base 19^20: mod_base = OTHER; note = phosphorothioate linkage
  modified_base 20^21: mod_base = OTHER; note = phosphorothioate linkage
  modified_base 2: mod_base = OTHER; note = 2-fluoro-modified nucleoside
  modified_base 4: mod_base = OTHER; note = 2-fluoro-modified nucleoside
  modified_base 6: mod_base = OTHER; note = 2-fluoro-modified nucleoside
  modified_base 8: mod_base = OTHER; note = 2-fluoro-modified nucleoside
  modified_base 10: mod_base = OTHER; note = 2-fluoro-modified nucleoside
  modified_base 12: mod_base = OTHER; note = 2-fluoro-modified nucleoside
  modified_base 14: mod_base = OTHER; note = 2-fluoro-modified nucleoside
  modified_base 16: mod_base = OTHER; note = 2-fluoro-modified nucleoside
  modified_base 18: mod_base = OTHER; note = 2-fluoro-modified nucleoside
tacttatcattgtcattgttt

SEQ ID NO: 3578 - RNA, 21 nt, synthetic construct
  source 1..21: mol_type = other RNA
  modified_base 19^20: mod_base = OTHER; note = phosphorothioate linkage
  modified_base 20^21: mod_base = OTHER; note = phosphorothioate linkage
  modified_base 2: mod_base = OTHER; note = 2-fluoro-modified nucleoside
  modified_base 4: mod_base = OTHER; note = 2-fluoro-modified nucleoside
  modified_base 6: mod_base = OTHER; note = 2-fluoro-modified nucleoside
  modified_base 10: mod_base = OTHER; note = 2-fluoro-modified nucleoside
  modified_base 12: mod_base = OTHER; note = 2-fluoro-modified nucleoside
  modified_base 14: mod_base = OTHER; note = 2-fluoro-modified nucleoside
  modified_base 16: mod_base = OTHER; note = 2-fluoro-modified nucleoside
  modified_base 18: mod_base = OTHER; note = 2-fluoro-modified nucleoside
tcagttgccttcaaacttatt

SEQ ID NO: 3579 - RNA, 21 nt, synthetic construct
  source 1..21: mol_type = other RNA
  modified_base 19^20: mod_base = OTHER; note = phosphorothioate linkage
  modified_base 20^21: mod_base = OTHER; note = phosphorothioate linkage
  modified_base 2: mod_base = OTHER; note = 2-fluoro-modified nucleoside
  modified_base 4: mod_base = OTHER; note = 2-fluoro-modified nucleoside
  modified_base 6: mod_base = OTHER; note = 2-fluoro-modified nucleoside
  modified_base 8: mod_base = OTHER; note = 2-fluoro-modified nucleoside
  modified_base 10: mod_base = OTHER; note = 2-fluoro-modified nucleoside
  modified_base 12: mod_base = OTHER; note = 2-fluoro-modified nucleoside
  modified_base 14: mod_base = OTHER; note = 2-fluoro-modified nucleoside
  modified_base 16: mod_base = OTHER; note = 2-fluoro-modified nucleoside
  modified_base 18: mod_base = OTHER; note = 2-fluoro-modified nucleoside
tgtaataaactccattgagtt

SEQ ID NO: 3580 - RNA, 21 nt, synthetic construct
  source 1..21: mol_type = other RNA
  modified_base 19^20: mod_base = OTHER; note = phosphorothioate linkage
  modified_base 20^21: mod_base = OTHER; note = phosphorothioate linkage
  modified_base 2: mod_base = OTHER; note = 2-fluoro-modified nucleoside
  modified_base 4: mod_base = OTHER; note = 2-fluoro-modified nucleoside
  modified_base 6: mod_base = OTHER; note = 2-fluoro-modified nucleoside
  modified_base 8: mod_base = OTHER; note = 2-fluoro-modified nucleoside
  modified_base 10: mod_base = OTHER; note = 2-fluoro-modified nucleoside
  modified_base 12: mod_base = OTHER; note = 2-fluoro-modified nucleoside
  modified_base 14: mod_base = OTHER; note = 2-fluoro-modified nucleoside
  modified_base 16: mod_base = OTHER; note = 2-fluoro-modified nucleoside
  modified_base 18: mod_base = OTHER; note = 2-fluoro-modified nucleoside
tggtaataaactccattgatt

SEQ ID NO: 3581 - RNA, 21 nt, synthetic construct
  source 1..21: mol_type = other RNA
  modified_base 19^20: mod_base = OTHER; note = phosphorothioate linkage
  modified_base 20^21: mod_base = OTHER; note = phosphorothioate linkage
  modified_base 2: mod_base = OTHER; note = 2-fluoro-modified nucleoside
  modified_base 4: mod_base = OTHER; note = 2-fluoro-modified nucleoside
  modified_base 6: mod_base = OTHER; note = 2-fluoro-modified nucleoside
  modified_base 8: mod_base = OTHER; note = 2-fluoro-modified nucleoside
  modified_base 10: mod_base = OTHER; note = 2-fluoro-modified nucleoside
  modified_base 12: mod_base = OTHER; note = 2-fluoro-modified nucleoside
  modified_base 14: mod_base = OTHER; note = 2-fluoro-modified nucleoside
  modified_base 16: mod_base = OTHER; note = 2-fluoro-modified nucleoside
  modified_base 18: mod_base = OTHER; note = 2-fluoro-modified nucleoside
tccaccttggtaataaacttt

SEQ ID NO: 3582 - RNA, 21 nt, synthetic construct
  source 1..21: mol_type = other RNA
  modified_base 19^20: mod_base = OTHER; note = phosphorothioate linkage
  modified_base 20^21: mod_base = OTHER; note = phosphorothioate linkage
  modified_base 2: mod_base = OTHER; note = 2-fluoro-modified nucleoside
  modified_base 4: mod_base = OTHER; note = 2-fluoro-modified nucleoside
  modified_base 6: mod_base = OTHER; note = 2-fluoro-modified nucleoside
  modified_base 8: mod_base = OTHER; note = 2-fluoro-modified nucleoside
  modified_base 10: mod_base = OTHER; note = 2-fluoro-modified nucleoside
  modified_base 12: mod_base = OTHER; note = 2-fluoro-modified nucleoside
  modified_base 14: mod_base = OTHER; note = 2-fluoro-modified nucleoside
  modified_base 16: mod_base = OTHER; note = 2-fluoro-modified nucleoside
  modified_base 18: mod_base = OTHER; note = 2-fluoro-modified nucleoside
tattaggagtagatgcttttt

SEQ ID NO: 3583 - RNA, 21 nt, synthetic construct
  source 1..21: mol_type = other RNA
  modified_base 19^20: mod_base = OTHER; note = phosphorothioate linkage
  modified_base 20^21: mod_base = OTHER; note = phosphorothioate linkage
  modified_base 2: mod_base = OTHER; note = 2-fluoro-modified nucleoside
  modified_base 4: mod_base = OTHER; note = 2-fluoro-modified nucleoside
  modified_base 6: mod_base = OTHER; note = 2-fluoro-modified nucleoside
  modified_base 8: mod_base = OTHER; note = 2-fluoro-modified nucleoside
  modified_base 10: mod_base = OTHER; note = 2-fluoro-modified nucleoside
  modified_base 12: mod_base = OTHER; note = 2-fluoro-modified nucleoside
  modified_base 14: mod_base = OTHER; note = 2-fluoro-modified nucleoside
  modified_base 16: mod_base = OTHER; note = 2-fluoro-modified nucleoside
  modified_base 18: mod_base = OTHER; note = 2-fluoro-modified nucleoside
tcattaggagtagatgctttt

SEQ ID NO: 3584 - RNA, 21 nt, synthetic construct
  source 1..21: mol_type = other RNA
  modified_base 19^20: mod_base = OTHER; note = phosphorothioate linkage
  modified_base 20^21: mod_base = OTHER; note = phosphorothioate linkage
  modified_base 2: mod_base = OTHER; note = 2-fluoro-modified nucleoside
  modified_base 4: mod_base = OTHER; note = 2-fluoro-modified nucleoside
  modified_base 6: mod_base = OTHER; note = 2-fluoro-modified nucleoside
  modified_base 8: mod_base = OTHER; note = 2-fluoro-modified nucleoside
  modified_base 10: mod_base = OTHER; note = 2-fluoro-modified nucleoside
  modified_base 12: mod_base = OTHER; note = 2-fluoro-modified nucleoside
  modified_base 14: mod_base = OTHER; note = 2-fluoro-modified nucleoside
  modified_base 16: mod_base = OTHER; note = 2-fluoro-modified nucleoside
  modified_base 18: mod_base = OTHER; note = 2-fluoro-modified nucleoside
ttaaccattaggagtagattt

SEQ ID NO: 3585 - RNA, 21 nt, synthetic construct
  source 1..21: mol_type = other RNA
  modified_base 19^20: mod_base = OTHER; note = phosphorothioate linkage
  modified_base 20^21: mod_base = OTHER; note = phosphorothioate linkage
  modified_base 2: mod_base = OTHER; note = 2-fluoro-modified nucleoside
  modified_base 4: mod_base = OTHER; note = 2-fluoro-modified nucleoside
  modified_base 6: mod_base = OTHER; note = 2-fluoro-modified nucleoside
  modified_base 8: mod_base = OTHER; note = 2-fluoro-modified nucleoside
  modified_base 10: mod_base = OTHER; note = 2-fluoro-modified nucleoside
  modified_base 12: mod_base = OTHER; note = 2-fluoro-modified nucleoside
  modified_base 14: mod_base = OTHER; note = 2-fluoro-modified nucleoside
  modified_base 16: mod_base = OTHER; note = 2-fluoro-modified nucleoside
  modified_base 18: mod_base = OTHER; note = 2-fluoro-modified nucleoside
tataaccattaggagtagatt

SEQ ID NO: 3586 - RNA, 21 nt, synthetic construct
  source 1..21: mol_type = other RNA
  modified_base 19^20: mod_base = OTHER; note = phosphorothioate linkage
  modified_base 20^21: mod_base = OTHER; note = phosphorothioate linkage
  modified_base 2: mod_base = OTHER; note = 2-fluoro-modified nucleoside
  modified_base 4: mod_base = OTHER; note = 2-fluoro-modified nucleoside
  modified_base 6: mod_base = OTHER; note = 2-fluoro-modified nucleoside
  modified_base 8: mod_base = OTHER; note = 2-fluoro-modified nucleoside
  modified_base 10: mod_base = OTHER; note = 2-fluoro-modified nucleoside
  modified_base 12: mod_base = OTHER; note = 2-fluoro-modified nucleoside
  modified_base 14: mod_base = OTHER; note = 2-fluoro-modified nucleoside
  modified_base 16: mod_base = OTHER; note = 2-fluoro-modified nucleoside
  modified_base 18: mod_base = OTHER; note = 2-fluoro-modified nucleoside
tcataaccattaggagtagtt

SEQ ID NO: 3587 - RNA, 21 nt, synthetic construct
  source 1..21: mol_type = other RNA
  modified_base 19^20: mod_base = OTHER; note = phosphorothioate linkage
  modified_base 20^21: mod_base = OTHER; note = phosphorothioate linkage
  modified_base 2: mod_base = OTHER; note = 2-fluoro-modified nucleoside
  modified_base 4: mod_base = OTHER; note = 2-fluoro-modified nucleoside
  modified_base 6: mod_base = OTHER; note = 2-fluoro-modified nucleoside
  modified_base 8: mod_base = OTHER; note = 2-fluoro-modified nucleoside
  modified_base 10: mod_base = OTHER; note = 2-fluoro-modified nucleoside
  modified_base 12: mod_base = OTHER; note = 2-fluoro-modified nucleoside
  modified_base 14: mod_base = OTHER; note = 2-fluoro-modified nucleoside
  modified_base 16: mod_base = OTHER; note = 2-fluoro-modified nucleoside
  modified_base 18: mod_base = OTHER; note = 2-fluoro-modified nucleoside
ttatcataaccattaggagtt

SEQ ID NO: 3588 - RNA, 21 nt, synthetic construct
  source 1..21: mol_type = other RNA
  modified_base 19^20: mod_base = OTHER; note = phosphorothioate linkage
  modified_base 20^21: mod_base = OTHER; note = phosphorothioate linkage
  modified_base 2: mod_base = OTHER; note = 2-fluoro-modified nucleoside
  modified_base 4: mod_base = OTHER; note = 2-fluoro-modified nucleoside
  modified_base 6: mod_base = OTHER; note = 2-fluoro-modified nucleoside
  modified_base 8: mod_base = OTHER; note = 2-fluoro-modified nucleoside
  modified_base 10: mod_base = OTHER; note = 2-fluoro-modified nucleoside
  modified_base 12: mod_base = OTHER; note = 2-fluoro-modified nucleoside
  modified_base 14: mod_base = OTHER; note = 2-fluoro-modified nucleoside
  modified_base 16: mod_base = OTHER; note = 2-fluoro-modified nucleoside
  modified_base 18: mod_base = OTHER; note = 2-fluoro-modified nucleoside
tattatcataaccattaggtt

SEQ ID NO: 3589 - RNA, 21 nt, synthetic construct
  source 1..21: mol_type = other RNA
  modified_base 19^20: mod_base = OTHER; note = phosphorothioate linkage
  modified_base 20^21: mod_base = OTHER; note = phosphorothioate linkage
  modified_base 2: mod_base = OTHER; note = 2-fluoro-modified nucleoside
  modified_base 4: mod_base = OTHER; note = 2-fluoro-modified nucleoside
  modified_base 6: mod_base = OTHER; note = 2-fluoro-modified nucleoside
  modified_base 8: mod_base = OTHER; note = 2-fluoro-modified nucleoside
  modified_base 10: mod_base = OTHER; note = 2-fluoro-modified nucleoside
  modified_base 12: mod_base = OTHER; note = 2-fluoro-modified nucleoside
  modified_base 14: mod_base = OTHER; note = 2-fluoro-modified nucleoside
  modified_base 16: mod_base = OTHER; note = 2-fluoro-modified nucleoside
  modified_base 18: mod_base = OTHER; note = 2-fluoro-modified nucleoside
ttccaagtggcccaaataatt

SEQ ID NO: 3590 - RNA, 21 nt, synthetic construct
  source 1..21: mol_type = other RNA
  modified_base 1: mod_base = OTHER; note = 2' O-methyl nucleoside
  modified_base 2: mod_base = OTHER; note = 2' fluoro-modified nucleoside
  modified_base 3: mod_base = OTHER; note = 2' O-methyl nucleoside
  modified_base 4: mod_base = OTHER; note = 2' fluoro-modified nucleoside
  modified_base 5: mod_base = OTHER; note = 2' O-methyl nucleoside
  modified_base 6: mod_base = OTHER; note = 2' fluoro-modified nucleoside
  modified_base 7: mod_base = OTHER; note = 2' O-methyl nucleoside
  modified_base 8: mod_base = OTHER; note = 2' fluoro-modified nucleoside
  modified_base 9: mod_base = OTHER; note = 2' O-methyl nucleoside
  modified_base 10: mod_base = OTHER; note = 2' fluoro-modified nucleoside
  modified_base 11: mod_base = OTHER; note = 2' O-methyl nucleoside
  modified_base 12: mod_base = OTHER; note = 2' fluoro-modified nucleoside
  modified_base 13: mod_base = OTHER; note = 2' O-methyl nucleoside
  modified_base 14: mod_base = OTHER; note = 2' fluoro-modified nucleoside
  modified_base 15: mod_base = OTHER; note = 2' O-methyl nucleoside
  modified_base 16: mod_base = OTHER; note = 2' fluoro-modified nucleoside
  modified_base 17: mod_base = OTHER; note = 2' O-methyl nucleoside
  modified_base 18: mod_base = OTHER; note = 2' fluoro-modified nucleoside
  modified_base 19: mod_base = OTHER; note = 2' O-methyl nucleoside with phosphorothioate linkage
  modified_base 20: mod_base = OTHER; note = 2' O-methyl nucleoside with phosphorothioate linkage
  modified_base 21: mod_base = OTHER; note = 2' O-methyl nucleoside
tgattatcttcatagtggttt

SEQ ID NO: 3591 - RNA, 21 nt, synthetic construct
  source 1..21: mol_type = other RNA
  modified_base 1: mod_base = OTHER; note = GalNAc#1
  modified_base 1^2: mod_base = OTHER; note = phosphorothioate linkage
  modified_base 2^3: mod_base = OTHER; note = phosphorothioate linkage
  modified_base 19^20: mod_base = OTHER; note = phosphorothioate linkage
  modified_base 20^21: mod_base = OTHER; note = phosphorothioate linkage
  modified_base 5: mod_base = OTHER; note = 2-fluoro-modified nucleoside
  modified_base 6: mod_base = OTHER; note = 2-fluoro-modified nucleoside
  modified_base 8: mod_base = OTHER; note = 2-fluoro-modified nucleoside
  modified_base 9: mod_base = OTHER; note = 2-fluoro-modified nucleoside
gatgaaagattcggtagtatt

SEQ ID NO: 3592 - RNA, 21 nt, synthetic construct
  source 1..21: mol_type = other RNA
  modified_base 1^2: mod_base = OTHER; note = phosphorothioate linkage
  modified_base 2^3: mod_base = OTHER; note = phosphorothioate linkage
  modified_base 19^20: mod_base = OTHER; note = phosphorothioate linkage
  modified_base 20^21: mod_base = OTHER; note = phosphorothioate linkage
  modified_base 1: mod_base = OTHER; note = GalNAc#1; note = 2-O-methyl modified nucleoside
  modified_base 7: mod_base = OTHER; note = 2-fluoro-modified nucleoside
  modified_base 9: mod_base = OTHER; note = 2-fluoro-modified nucleoside
  modified_base 10: mod_base = OTHER; note = 2-fluoro-modified nucleoside
ggaaatgagaagattcatatt

SEQ ID NO: 3593 - RNA, 21 nt, synthetic construct
  source 1..21: mol_type = other RNA
  modified_base 1: mod_base = OTHER; note = GalNAc#1
  modified_base 1^2: mod_base = OTHER; note = phosphorothioate linkage
  modified_base 2^3: mod_base = OTHER; note = phosphorothioate linkage
  modified_base 19^20: mod_base = OTHER; note = phosphorothioate linkage
  modified_base 20^21: mod_base = OTHER; note = phosphorothioate linkage
  modified_base 5: mod_base = OTHER; note = 2-fluoro-modified nucleoside
  modified_base 9: mod_base = OTHER; note = 2-fluoro-modified nucleoside
gaagattcatttgataagatt

SEQ ID NO: 3594 - RNA, 21 nt, synthetic construct
  source 1..21: mol_type = other RNA
  modified_base 1: mod_base = OTHER; note = 2-O-methyl modified nucleoside; note = GalNAc#1
  modified_base 1^2: mod_base = OTHER; note = phosphorothioate linkage
  modified_base 2^3: mod_base = OTHER; note = phosphorothioate linkage
  modified_base 19^20: mod_base = OTHER; note = phosphorothioate linkage
  modified_base 20^21: mod_base = OTHER; note = phosphorothioate linkage
  modified_base 8: mod_base = OTHER; note = 2-fluoro-modified nucleoside
  modified_base 9: mod_base = OTHER; note = 2-fluoro-modified nucleoside
  modified_base 10: mod_base = OTHER; note = 2-fluoro-modified nucleoside
  modified_base 11: mod_base = OTHER; note = 2-fluoro-modified nucleoside
taagtttgaaggcaactgatt

SEQ ID NO: 3595 - RNA, 21 nt, synthetic construct
  source 1..21: mol_type = other RNA
  modified_base 1^2: mod_base = OTHER; note = phosphorothioate linkage
  modified_base 2^3: mod_base = OTHER; note = phosphorothioate linkage
  modified_base 19^20: mod_base = OTHER; note = phosphorothioate linkage
  modified_base 20^21: mod_base = OTHER; note = phosphorothioate linkage
  modified_base 2: mod_base = OTHER; note = 2-fluoro-modified nucleoside
  modified_base 4: mod_base = OTHER; note = 2-fluoro-modified nucleoside
  modified_base 6: mod_base = OTHER; note = 2-fluoro-modified nucleoside
  modified_base 8: mod_base = OTHER; note = 2-fluoro-modified nucleoside
  modified_base 10: mod_base = OTHER; note = 2-fluoro-modified nucleoside
  modified_base 12: mod_base = OTHER; note = 2-fluoro-modified nucleoside
  modified_base 14: mod_base = OTHER; note = 2-fluoro-modified nucleoside
  modified_base 16: mod_base = OTHER; note = 2-fluoro-modified nucleoside
  modified_base 18: mod_base = OTHER; note = 2-fluoro-modified nucleoside
tactaccgaatctttcatctt

SEQ ID NO: 3596 - RNA, 21 nt, synthetic construct
  source 1..21: mol_type = other RNA
  modified_base 1^2: mod_base = OTHER; note = phosphorothioate linkage
  modified_base 2^3: mod_base = OTHER; note = phosphorothioate linkage
  modified_base 19^20: mod_base = OTHER; note = phosphorothioate linkage
  modified_base 20^21: mod_base = OTHER; note = phosphorothioate linkage
  modified_base 2: mod_base = OTHER; note = 2-fluoro-modified nucleoside
  modified_base 4: mod_base = OTHER; note = 2-fluoro-modified nucleoside
  modified_base 6: mod_base = OTHER; note = 2-fluoro-modified nucleoside
  modified_base 8: mod_base = OTHER; note = 2-fluoro-modified nucleoside
  modified_base 10: mod_base = OTHER; note = 2-fluoro-modified nucleoside
  modified_base 12: mod_base = OTHER; note = 2-fluoro-modified nucleoside
  modified_base 14: mod_base = OTHER; note = 2-fluoro-modified nucleoside
  modified_base 16: mod_base = OTHER; note = 2-fluoro-modified nucleoside
  modified_base 18: mod_base = OTHER; note = 2-fluoro-modified nucleoside
tatgaatcttctcatttcctt

SEQ ID NO: 3597 - RNA, 21 nt, synthetic construct
  source 1..21: mol_type = other RNA
  modified_base 1^2: mod_base = OTHER; note = phosphorothioate linkage
  modified_base 2^3: mod_base = OTHER; note = phosphorothioate linkage
  modified_base 19^20: mod_base = OTHER; note = phosphorothioate linkage
  modified_base 20^21: mod_base = OTHER; note = phosphorothioate linkage
  modified_base 2: mod_base = OTHER; note = 2-fluoro-modified nucleoside
  modified_base 4: mod_base = OTHER; note = 2-fluoro-modified nucleoside
  modified_base 6: mod_base = OTHER; note = 2-fluoro-modified nucleoside
  modified_base 8: mod_base = OTHER; note = 2-fluoro-modified nucleoside
  modified_base 10: mod_base = OTHER; note = 2-fluoro-modified nucleoside
  modified_base 12: mod_base = OTHER; note = 2-fluoro-modified nucleoside
  modified_base 14: mod_base = OTHER; note = 2-fluoro-modified nucleoside
  modified_base 16: mod_base = OTHER; note = 2-fluoro-modified nucleoside
  modified_base 18: mod_base = OTHER; note = 2-fluoro-modified nucleoside
tcttatcaaatgaatcttctt

SEQ ID NO: 3598 - RNA, 21 nt, synthetic construct
  source 1..21: mol_type = other RNA
  modified_base 1^2: mod_base = OTHER; note = phosphorothioate linkage
  modified_base 2^3: mod_base = OTHER; note = phosphorothioate linkage
  modified_base 19^20: mod_base = OTHER; note = phosphorothioate linkage
  modified_base 20^21: mod_base = OTHER; note = phosphorothioate linkage
  modified_base 2: mod_base = OTHER; note = 2-fluoro-modified nucleoside
  modified_base 4: mod_base = OTHER; note = 2-fluoro-modified nucleoside
  modified_base 6: mod_base = OTHER; note = 2-fluoro-modified nucleoside
  modified_base 8: mod_base = OTHER; note = 2-fluoro-modified nucleoside
  modified_base 10: mod_base = OTHER; note = 2-fluoro-modified nucleoside
  modified_base 12: mod_base = OTHER; note = 2-fluoro-modified nucleoside
  modified_base 14: mod_base = OTHER; note = 2-fluoro-modified nucleoside
  modified_base 16: mod_base = OTHER; note = 2-fluoro-modified nucleoside
  modified_base 18: mod_base = OTHER; note = 2-fluoro-modified nucleoside
tcagttgccttcaaacttatt

SEQ ID NO: 3599 - RNA, 21 nt, synthetic construct
  source 1..21: mol_type = other RNA
  modified_base 1: mod_base = OTHER; note = GalNAc#1; note = 2-O-methyl modified nucleoside
  modified_base 1^2: mod_base = OTHER; note = phosphorothioate linkage
  modified_base 2^3: mod_base = OTHER; note = phosphorothioate linkage
  modified_base 19^20: mod_base = OTHER; note = phosphorothioate linkage
  modified_base 20^21: mod_base = OTHER; note = phosphorothioate linkage
  modified_base 6: mod_base = OTHER; note = 2-fluoro-modified nucleoside
  modified_base 8: mod_base = OTHER; note = 2-fluoro-modified nucleoside
  modified_base 9: mod_base = OTHER; note = 2-fluoro-modified nucleoside
  modified_base 14: mod_base = OTHER; note = 2-O-methyl modified nucleoside
  modified_base 16: mod_base = OTHER; note = 2-O-methyl modified nucleoside
  modified_base 18: mod_base = OTHER; note = 2-O-methyl modified nucleoside
  modified_base 1: mod_base = OTHER; note = 2-O-methyl modified nucleoside
  modified_base 2: mod_base = OTHER; note = 2-O-methyl modified nucleoside
  modified_base 3: mod_base = OTHER; note = 2-O-methyl modified nucleoside
  modified_base 4: mod_base = OTHER; note = 2-O-methyl modified nucleoside
  modified_base 5: mod_base = OTHER; note = 2-O-methyl modified nucleoside
  modified_base 7: mod_base = OTHER; note = 2-O-methyl modified nucleoside
  modified_base 10: mod_base = OTHER; note = 2-O-methyl modified nucleoside
  modified_base 11: mod_base = OTHER; note = 2-O-methyl modified nucleoside
  modified_base 12: mod_base = OTHER; note = 2-O-methyl modified nucleoside
  modified_base 13: mod_base = OTHER; note = 2-O-methyl modified nucleoside
  modified_base 14: mod_base = OTHER; note = 2-O-methyl modified nucleoside
  modified_base 15: mod_base = OTHER; note = 2-O-methyl modified nucleoside
  modified_base 16: mod_base = OTHER; note = 2-O-methyl modified nucleoside
  modified_base 17: mod_base = OTHER; note = 2-O-methyl modified nucleoside
  modified_base 18: mod_base = OTHER; note = 2-O-methyl modified nucleoside
  modified_base 19: mod_base = OTHER; note = 2-O-methyl modified nucleoside
  modified_base 20: mod_base = OTHER; note = 2-O-methyl modified nucleoside
  modified_base 21: mod_base = OTHER; note = 2-O-methyl modified nucleoside
gatgaaagattcggtagtatt

SEQ ID NO: 3600 - RNA, 21 nt, synthetic construct
  source 1..21: mol_type = other RNA
  modified_base 1: mod_base = OTHER; note = GalNAc#1; note = 2-O-methyl modified nucleoside
  modified_base 1^2: mod_base = OTHER; note = phosphorothioate linkage
  modified_base 2^3: mod_base = OTHER; note = phosphorothioate linkage
  modified_base 19^20: mod_base = OTHER; note = phosphorothioate linkage
  modified_base 20^21: mod_base = OTHER; note = phosphorothioate linkage
  modified_base 6: mod_base = OTHER; note = 2-fluoro-modified nucleoside
  modified_base 7: mod_base = OTHER; note = 2-fluoro-modified nucleoside
  modified_base 9: mod_base = OTHER; note = 2-fluoro-modified nucleoside
gatgaaagattcggtagtatt

SEQ ID NO: 3601 - RNA, 21 nt, synthetic construct
  source 1..21: mol_type = other RNA
  modified_base 1^2: mod_base = OTHER; note = phosphorothioate linkage
  modified_base 2^3: mod_base = OTHER; note = phosphorothioate linkage
  modified_base 19^20: mod_base = OTHER; note = phosphorothioate linkage
  modified_base 20^21: mod_base = OTHER; note = phosphorothioate linkage
  modified_base 6: mod_base = OTHER; note = 2-fluoro-modified nucleoside
  modified_base 7: mod_base = OTHER; note = 2-fluoro-modified nucleoside
  modified_base 8: mod_base = OTHER; note = 2-fluoro-modified nucleoside
  modified_base 9: mod_base = OTHER; note = 2-fluoro-modified nucleoside
  modified_base 1: mod_base = OTHER; note = 2-O-methyl modified nucleoside; note = GalNAc#1
gatgaaagattcggtagtatt

SEQ ID NO: 3602 - RNA, 21 nt, synthetic construct
  source 1..21: mol_type = other RNA
  modified_base 1: mod_base = OTHER; note = GalNAc#1; note = 2-O-methyl modified nucleoside
  modified_base 1^2: mod_base = OTHER; note = phosphorothioate linkage
  modified_base 2^3: mod_base = OTHER; note = phosphorothioate linkage
  modified_base 19^20: mod_base = OTHER; note = phosphorothioate linkage
  modified_base 20^21: mod_base = OTHER; note = phosphorothioate linkage
  modified_base 5: mod_base = OTHER; note = 2-fluoro-modified nucleoside
  modified_base 8: mod_base = OTHER; note = 2-fluoro-modified nucleoside
  modified_base 9: mod_base = OTHER; note = 2-fluoro-modified nucleoside
gatgaaagattcggtagtatt

SEQ ID NO: 3603 - RNA, 21 nt, synthetic construct
  source 1..21: mol_type = other RNA
  modified_base 1: mod_base = OTHER; note = GalNAc#1; note = 2-O-methyl modified nucleoside
  modified_base 1^2: mod_base = OTHER; note = phosphorothioate linkage
  modified_base 2^3: mod_base = OTHER; note = phosphorothioate linkage
  modified_base 19^20: mod_base = OTHER; note = phosphorothioate linkage
  modified_base 20^21: mod_base = OTHER; note = phosphorothioate linkage
  modified_base 5: mod_base = OTHER; note = 2-fluoro-modified nucleoside
  modified_base 7: mod_base = OTHER; note = 2-fluoro-modified nucleoside
  modified_base 9: mod_base = OTHER; note = 2-fluoro-modified nucleoside
gatgaaagattcggtagtatt

SEQ ID NO: 3604 - RNA, 21 nt, synthetic construct
  source 1..21: mol_type = other RNA
  modified_base 1: mod_base = OTHER; note = 2-O-methyl modified nucleoside; note = GalNAc#1
  modified_base 1^2: mod_base = OTHER; note = phosphorothioate linkage
  modified_base 2^3: mod_base = OTHER; note = phosphorothioate linkage
  modified_base 19^20: mod_base = OTHER; note = phosphorothioate linkage
  modified_base 20^21: mod_base = OTHER; note = phosphorothioate linkage
  modified_base 5: mod_base = OTHER; note = 2-fluoro-modified nucleoside
  modified_base 6: mod_base = OTHER; note = 2-fluoro-modified nucleoside
  modified_base 9: mod_base = OTHER; note = 2-fluoro-modified nucleoside
gatgaaagattcggtagtatt

SEQ ID NO: 3605 - RNA, 21 nt, synthetic construct
  source 1..21: mol_type = other RNA
  modified_base 5: mod_base = OTHER; note = 2-fluoro-modified nucleoside
  modified_base 6: mod_base = OTHER; note = 2-fluoro-modified nucleoside
  modified_base 7: mod_base = OTHER; note = 2-fluoro-modified nucleoside
  modified_base 8: mod_base = OTHER; note = 2-fluoro-modified nucleoside
  modified_base 1: mod_base = OTHER; note = GalNAc#1; note = 2-O-methyl modified nucleoside
  modified_base 1^2: mod_base = OTHER; note = 2-fluoro-modified nucleoside
  modified_base 2^3: mod_base = OTHER; note = 2-fluoro-modified nucleoside
  modified_base 19^20: mod_base = OTHER; note = 2-fluoro-modified nucleoside
  modified_base 20^21: mod_base = OTHER; note = 2-fluoro-modified nucleoside
gatgaaagattcggtagtatt

SEQ ID NO: 3606 - RNA, 21 nt, synthetic construct
  source 1..21: mol_type = other RNA
  modified_base 1: mod_base = OTHER; note = 2-O-methyl modified nucleoside; note = GalNAc#1
  modified_base 1^2: mod_base = OTHER; note = phosphorothioate linkage
  modified_base 2^3: mod_base = OTHER; note = phosphorothioate linkage
  modified_base 19^20: mod_base = OTHER; note = phosphorothioate linkage
  modified_base 20^21: mod_base = OTHER; note = phosphorothioate linkage
  modified_base 8: mod_base = OTHER; note = 2-fluoro-modified nucleoside
  modified_base 9: mod_base = OTHER; note = 2-fluoro-modified nucleoside
  modified_base 11: mod_base = OTHER; note = 2-fluoro-modified nucleoside
ggaaatgagaagattcatatt

SEQ ID NO: 3607 - RNA, 21 nt, synthetic construct
  source 1..21: mol_type = other RNA
  modified_base 1: mod_base = OTHER; note = 2-O-methyl modified nucleoside; note = GalNAc#1
  modified_base 1^2: mod_base = OTHER; note = phosphorothioate linkage
  modified_base 2^3: mod_base = OTHER; note = phosphorothioate linkage
  modified_base 19^20: mod_base = OTHER; note = phosphorothioate linkage
  modified_base 20^21: mod_base = OTHER; note = phosphorothioate linkage
  modified_base 8: mod_base = OTHER; note = 2-fluoro-modified nucleoside
  modified_base 9: mod_base = OTHER; note = 2-fluoro-modified nucleoside
  modified_base 10: mod_base = OTHER; note = 2-fluoro-modified nucleoside
  modified_base 11: mod_base = OTHER; note = 2-fluoro-modified nucleoside
ggaaatgagaagattcatatt

SEQ ID NO: 3608 - RNA, 21 nt, synthetic construct
  source 1..21: mol_type = other RNA
  modified_base 1: mod_base = OTHER; note = GalNAc#1; note = 2-O-methyl modified nucleoside
  modified_base 1^2: mod_base = OTHER; note = phosphorothioate linkage
  modified_base 2^3: mod_base = OTHER; note = phosphorothioate linkage
  modified_base 19^20: mod_base = OTHER; note = phosphorothioate linkage
  modified_base 20^21: mod_base = OTHER; note = phosphorothioate linkage
  modified_base 7: mod_base = OTHER; note = 2-fluoro-modified nucleoside
  modified_base 9: mod_base = OTHER; note = 2-fluoro-modified nucleoside
  modified_base 11: mod_base = OTHER; note = 2-fluoro-modified nucleoside
ggaaatgagaagattcatatt

SEQ ID NO: 3609 - RNA, 21 nt, synthetic construct
  source 1..21: mol_type = other RNA
  modified_base 1: mod_base = OTHER; note = 2-O-methyl modified nucleoside; note = GalNAc#1
  modified_base 1^2: mod_base = OTHER; note = phosphorothioate linkage
  modified_base 2^3: mod_base = OTHER; note = phosphorothioate linkage
  modified_base 19^20: mod_base = OTHER; note = phosphorothioate linkage
  modified_base 20^21: mod_base = OTHER; note = phosphorothioate linkage
  modified_base 7: mod_base = OTHER; note = 2-fluoro-modified nucleoside
  modified_base 8: mod_base = OTHER; note = 2-fluoro-modified nucleoside
  modified_base 9: mod_base = OTHER; note = 2-fluoro-modified nucleoside
  modified_base 10: mod_base = OTHER; note = 2-fluoro-modified nucleoside
ggaaatgagaagattcatatt

SEQ ID NO: 3610 - RNA, 21 nt, synthetic construct
  source 1..21: mol_type = other RNA
  modified_base 1: mod_base = OTHER; note = GalNAc#1; note = 2-O-methyl modified nucleoside
  modified_base 1^2: mod_base = OTHER; note = phosphorothioate linkage
  modified_base 2^3: mod_base = OTHER; note = phosphorothioate linkage
  modified_base 19^20: mod_base = OTHER; note = phosphorothioate linkage
  modified_base 20^21: mod_base = OTHER; note = phosphorothioate linkage
  modified_base 7: mod_base = OTHER; note = 2-fluoro-modified nucleoside
  modified_base 8: mod_base = OTHER; note = 2-fluoro-modified nucleoside
  modified_base 9: mod_base = OTHER; note = 2-fluoro-modified nucleoside
  modified_base 10: mod_base = OTHER; note = 2-fluoro-modified nucleoside
  modified_base 11: mod_base = OTHER; note = 2-fluoro-modified nucleoside
ggaaatgagaagattcatatt

SEQ ID NO: 3611 - RNA, 21 nt, synthetic construct
  source 1..21: mol_type = other RNA
  modified_base 1: mod_base = OTHER; note = GalNAc#1; note = 2-O-methyl modified nucleoside
  modified_base 1^2: mod_base = OTHER; note = phosphorothioate linkage
  modified_base 2^3: mod_base = OTHER; note = phosphorothioate linkage
  modified_base 19^20: mod_base = OTHER; note = phosphorothioate linkage
  modified_base 20^21: mod_base = OTHER; note = phosphorothioate linkage
  modified_base 5: mod_base = OTHER; note = 2-fluoro-modified nucleoside
  modified_base 9: mod_base = OTHER; note = 2-fluoro-modified nucleoside
  modified_base 11: mod_base = OTHER; note = 2-fluoro-modified nucleoside
ggaaatgagaagattcatatt

SEQ ID NO: 3612 - RNA, 21 nt, synthetic construct
  source 1..21: mol_type = other RNA
  modified_base 1: mod_base = OTHER; note = GalNAc#1; note = 2-O-methyl modified nucleoside
  modified_base 1^2: mod_base = OTHER; note = phosphorothioate linkage
  modified_base 2^3: mod_base = OTHER; note = phosphorothioate linkage
  modified_base 19^20: mod_base = OTHER; note = phosphorothioate linkage
  modified_base 20^21: mod_base = OTHER; note = phosphorothioate linkage
  modified_base 5: mod_base = OTHER; note = 2-fluoro-modified nucleoside
  modified_base 9: mod_base = OTHER; note = 2-fluoro-modified nucleoside
  modified_base 10: mod_base = OTHER; note = 2-fluoro-modified nucleoside
ggaaatgagaagattcatatt

SEQ ID NO: 3613 - RNA, 21 nt, synthetic construct
  source 1..21: mol_type = other RNA
  modified_base 1: mod_base = OTHER; note = 2-O-methyl modified nucleoside; note = GalNAc#1
  modified_base 1^2: mod_base = OTHER; note = phosphorothioate linkage
  modified_base 2^3: mod_base = OTHER; note = phosphorothioate linkage
  modified_base 19^20: mod_base = OTHER; note = phosphorothioate linkage
  modified_base 20^21: mod_base = OTHER; note = phosphorothioate linkage
  modified_base 5: mod_base = OTHER; note = 2-fluoro-modified nucleoside
  modified_base 8: mod_base = OTHER; note = 2-fluoro-modified nucleoside
  modified_base 9: mod_base = OTHER; note = 2-fluoro-modified nucleoside
ggaaatgagaagattcatatt

SEQ ID NO: 3614 - RNA, 21 nt, synthetic construct
  source 1..21: mol_type = other RNA
  modified_base 1: mod_base = OTHER; note = 2-O-methyl modified nucleoside; note = GalNAc#1
  modified_base 1^2: mod_base = OTHER; note = phosphorothioate linkage
  modified_base 2^3: mod_base = OTHER; note = phosphorothioate linkage
  modified_base 19^20: mod_base = OTHER; note = phosphorothioate linkage
  modified_base 20^21: mod_base = OTHER; note = phosphorothioate linkage
  modified_base 5: mod_base = OTHER; note = 2-fluoro-modified nucleoside
  modified_base 8: mod_base = OTHER; note = 2-fluoro-modified nucleoside
  modified_base 9: mod_base = OTHER; note = 2-fluoro-modified nucleoside
ggaaatgagaagattcatatt

SEQ ID NO: 3615 - RNA, 21 nt, synthetic construct
  source 1..21: mol_type = other RNA
  modified_base 1: mod_base = OTHER; note = GalNAc#1; note = 2-O-methyl modified nucleoside
  modified_base 1^2: mod_base = OTHER; note = phosphorothioate linkage
  modified_base 2^3: mod_base = OTHER; note = phosphorothioate linkage
  modified_base 19^20: mod_base = OTHER; note = phosphorothioate linkage
  modified_base 20^21: mod_base = OTHER; note = phosphorothioate linkage
  modified_base 5: mod_base = OTHER; note = 2-fluoro-modified nucleoside
  modified_base 8: mod_base = OTHER; note = 2-fluoro-modified nucleoside
  modified_base 9: mod_base = OTHER; note = 2-fluoro-modified nucleoside
ggaaatgagaagattcatatt

SEQ ID NO: 3616 - RNA, 21 nt, synthetic construct
  source 1..21: mol_type = other RNA
  modified_base 1: mod_base = OTHER; note = 2-O-methyl modified nucleoside; note = GalNAc#1
  modified_base 1^2: mod_base = OTHER; note = phosphorothioate linkage
  modified_base 2^3: mod_base = OTHER; note = phosphorothioate linkage
  modified_base 19^20: mod_base = OTHER; note = phosphorothioate linkage
  modified_base 20^21: mod_base = OTHER; note = phosphorothioate linkage
  modified_base 5: mod_base = OTHER; note = 2-fluoro-modified nucleoside
  modified_base 7: mod_base = OTHER; note = 2-fluoro-modified nucleoside
  modified_base 9: mod_base = OTHER; note = 2-fluoro-modified nucleoside
ggaaatgagaagattcatatt

SEQ ID NO: 3617 - RNA, 21 nt, synthetic construct
  source 1..21: mol_type = other RNA
  modified_base 1: mod_base = OTHER; note = GalNAc#1; note = 2-O-methyl modified nucleoside
  modified_base 1^2: mod_base = OTHER; note = phosphorothioate linkage
  modified_base 2^3: mod_base = OTHER; note = phosphorothioate linkage
  modified_base 19^20: mod_base = OTHER; note = phosphorothioate linkage
  modified_base 20^21: mod_base = OTHER; note = phosphorothioate linkage
  modified_base 5: mod_base = OTHER; note = 2-fluoro-modified nucleoside
  modified_base 7: mod_base = OTHER; note = 2-fluoro-modified nucleoside
  modified_base 9: mod_base = OTHER; note = 2-fluoro-modified nucleoside
ggaaatgagaagattcatatt

SEQ ID NO: 3618 - RNA, 21 nt, synthetic construct
  source 1..21: mol_type = other RNA
  modified_base 1: mod_base = OTHER; note = GalNAc#1; note = 2-O-methyl modified nucleoside
  modified_base 1^2: mod_base = OTHER; note = phosphorothioate linkage
  modified_base 2^3: mod_base = OTHER; note = phosphorothioate linkage
  modified_base 19^20: mod_base = OTHER; note = phosphorothioate linkage
  modified_base 20^21: mod_base = OTHER; note = phosphorothioate linkage
  modified_base 5: mod_base = OTHER; note = 2-fluoro-modified nucleoside
  modified_base 7: mod_base = OTHER; note = 2-fluoro-modified nucleoside
  modified_base 9: mod_base = OTHER; note = 2-fluoro-modified nucleoside
  modified_base 10: mod_base = OTHER; note = 2-fluoro-modified nucleoside
ggaaatgagaagattcatatt

SEQ ID NO: 3619 - RNA, 21 nt, synthetic construct
  source 1..21: mol_type = other RNA
  modified_base 1: mod_base = OTHER; note = GalNAc#1; note = 2-O-methyl modified nucleoside
  modified_base 1^2: mod_base = OTHER; note = phosphorothioate linkage
  modified_base 2^3: mod_base = OTHER; note = phosphorothioate linkage
  modified_base 19^20: mod_base = OTHER; note = phosphorothioate linkage
  modified_base 20^21: mod_base = OTHER; note = phosphorothioate linkage
  modified_base 5: mod_base = OTHER; note = 2-fluoro-modified nucleoside
  modified_base 7: mod_base = OTHER; note = 2-fluoro-modified nucleoside
  modified_base 8: mod_base = OTHER; note = 2-fluoro-modified nucleoside
  modified_base 9: mod_base = OTHER; note = 2-fluoro-modified nucleoside
  modified_base 10: mod_base = OTHER; note = 2-fluoro-modified nucleoside
ggaaatgagaagattcatatt

SEQ ID NO: 3620 - RNA, 21 nt, synthetic construct
  source 1..21: mol_type = other RNA
  modified_base 1: mod_base = OTHER; note = GalNAc#1; note = 2-O-methyl modified nucleoside
  modified_base 1^2: mod_base = OTHER; note = phosphorothioate linkage
  modified_base 2^3: mod_base = OTHER; note = phosphorothioate linkage
  modified_base 19^20: mod_base = OTHER; note = phosphorothioate linkage
  modified_base 20^21: mod_base = OTHER; note = phosphorothioate linkage
  modified_base 8: mod_base = OTHER; note = 2-fluoro-modified nucleoside
  modified_base 9: mod_base = OTHER; note = 2-fluoro-modified nucleoside
  modified_base 11: mod_base = OTHER; note = 2-fluoro-modified nucleoside
taagtttgaaggcaactgatt

SEQ ID NO: 3621 - RNA, 1760 nt, synthetic construct
  source 1..1760: mol_type = other RNA
aaaaaggaggagcttcaacctgtgtgcaaaatctgggaacctgacagtataggttgggggccaggatgaggaaaaaggaacgggaaagacctgcccacccttctggtaaggaggccccgtgatcagctccagccatttgcagtcctggctatcccaggagcttacataaagggacaattggagcctgagaggtgacagtgctgacactacaaggctcggagctccgggcactcagacatcatgagttggtccttgcacccccggaatttaattctctacttctatgctcttttatttctctcttcaacatgtgtagcatatgttgctaccagagacaactgctgcatcttagatgaaagattcggtagttattgtccaactacctgtggcattgcagatttcctgtctacttatcaaaccaaagtagacaaggatctacagtctttggaagacatcttacatcaagttgaaaacaaaacatcagaagtcaaacagctgataaaagcaatccaactcacttataatcctgatgaatcatcaaaaccaaatatgatagacgctgctactttgaagtccaggaaaatgttagaagaaattatgaaatatgaagcatcgattttaacacatgactcaagtattcgatatttgcaggaaatatataattcaaataatcaaaagattgttaacctgaaagagaaggtagcccagcttgaagcacagtgccaggaaccttgcaaagacacggtgcaaatccatgatatcactgggaaagattgtcaagacattgccaataagggagctaaacagagcgggctttactttattaaacctctgaaagctaaccagcaattcttagtctactgtgaaatcgatgggtctggaaatggatggactgtgtttcagaagagacttgatggcagtgtagatttcaagaaaaactggattcaatataaagaaggatttggacatctgtctcctactggcacaacagaattttggctgggaaatgagaagattcatttgataagcacacagtctgccatcccatatgcattaagagtggaactggaagactggaatggcagaaccagtactgcagactatgccatgttcaaggtgggacctgaagctgacaagtaccgcctaacatatgcctacttcgctggtggggatgctggagatgcctttgatggctttgattttggcgatgatcctagtgacaagtttttcacatcccataatggcatgcagttcagtacctgggacaatgacaatgataagtttgaaggcaactgtgctgaacaggatggatctggttggtggatgaacaagtgtcacgctggccatctcaatggagtttattaccaaggtggcacttactcaaaagcatctactcctaatggttatgataatggcattatttgggccacttggaaaacccggtggtattccatgaagaaaaccactatgaagataatcccattcaacagactcacaattggagaaggacagcaacaccacctggggggagccaaacaggctggagacgtttaaaagaccgtttcaaaagagatttacttttttaaaggactttatctgaacagagagatataatatttttcctattggacaatggacttgcaaagcttcacttcattttaagagcaaaagaccccatgttgaaaactccataacagttttatgctgatgataatttatctacatgcatttcaataaaccttttgtttcctaagactaga

SEQ ID NO: 3622-3639 - skipped (18 entries)

SEQ ID NO: 3640 - RNA, 18 nt, synthetic construct
  source 1..18: mol_type = other RNA
  modified_base 14: mod_base = OTHER; note = Thymine
cagacatcatgagttggt

SEQ ID NO: 3641 - RNA, 21 nt, synthetic construct
  source 1..21: mol_type = other RNA
  modified_base 1: mod_base = OTHER; note = 2-O-methyl modified nucleoside; note = GalNAc
  modified_base 5: mod_base = OTHER; note = 2-fluoro-modified nucleoside
  modified_base 6: mod_base = OTHER; note = 2-fluoro-modified nucleoside
  modified_base 8: mod_base = OTHER; note = 2-fluoro-modified nucleoside
  modified_base 9: mod_base = OTHER; note = 2-fluoro-modified nucleoside
  modified_base 2: mod_base = OTHER; note = 2-O-methyl modified nucleoside
  modified_base 3: mod_base = OTHER; note = 2-O-methyl modified nucleoside
  modified_base 4: mod_base = OTHER; note = 2-O-methyl modified nucleoside
  modified_base 7: mod_base = OTHER; note = 2-O-methyl modified nucleoside
  modified_base 10: mod_base = OTHER; note = 2-O-methyl modified nucleoside
  modified_base 11: mod_base = OTHER; note = 2-O-methyl modified nucleoside
  modified_base 12: mod_base = OTHER; note = 2-O-methyl modified nucleoside
  modified_base 13: mod_base = OTHER; note = 2-O-methyl modified nucleoside
  modified_base 14: mod_base = OTHER; note = 2-O-methyl modified nucleoside
  modified_base 15: mod_base = OTHER; note = 2-O-methyl modified nucleoside
  modified_base 16: mod_base = OTHER; note = 2-O-methyl modified nucleoside
  modified_base 17: mod_base = OTHER; note = 2-O-methyl modified nucleoside
  modified_base 18: mod_base = OTHER; note = 2-O-methyl modified nucleoside
  modified_base 19: mod_base = OTHER; note = 2-O-methyl modified nucleoside
  modified_base 20: mod_base = OTHER; note = 2-O-methyl modified nucleoside
  modified_base 21: mod_base = OTHER; note = 2-O-methyl modified nucleoside
  modified_base 1^2: mod_base = OTHER; note = phosphorothioate linkage
  modified_base 2^3: mod_base = OTHER; note = phosphorothioate linkage
  modified_base 19^20: mod_base = OTHER; note = phosphorothioate linkage
  modified_base 20^21: mod_base = OTHER; note = phosphorothioate linkage
gatgaaagattcggtagtatt

SEQ ID NO: 3642 - RNA, 21 nt, synthetic construct
  source 1..21: mol_type = other RNA
  modified_base 5: mod_base = OTHER; note = 2-fluoro-modified nucleoside
  modified_base 9: mod_base = OTHER; note = 2-fluoro-modified nucleoside
  modified_base 1: mod_base = OTHER; note = GalNAc; note = 2-O-methyl modified nucleoside
  modified_base 2: mod_base = OTHER; note = 2-O-methyl modified nucleoside
  modified_base 3: mod_base = OTHER; note = 2-O-methyl modified nucleoside
  modified_base 4: mod_base = OTHER; note = 2-O-methyl modified nucleoside
  modified_base 6: mod_base = OTHER; note = 2-O-methyl modified nucleoside
  modified_base 7: mod_base = OTHER; note = 2-O-methyl modified nucleoside
  modified_base 8: mod_base = OTHER; note = 2-O-methyl modified nucleoside
  modified_base 10: mod_base = OTHER; note = 2-O-methyl modified nucleoside
  modified_base 11: mod_base = OTHER; note = 2-O-methyl modified nucleoside
  modified_base 12: mod_base = OTHER; note = 2-O-methyl modified nucleoside
  modified_base 13: mod_base = OTHER; note = 2-O-methyl modified nucleoside
  modified_base 14: mod_base = OTHER; note = 2-O-methyl modified nucleoside
  modified_base 15: mod_base = OTHER; note = 2-O-methyl modified nucleoside
  modified_base 16: mod_base = OTHER; note = 2-O-methyl modified nucleoside
  modified_base 17: mod_base = OTHER; note = 2-O-methyl modified nucleoside
  modified_base 18: mod_base = OTHER; note = 2-O-methyl modified nucleoside
  modified_base 19: mod_base = OTHER; note = 2-O-methyl modified nucleoside
  modified_base 20: mod_base = OTHER; note = 2-O-methyl modified nucleoside
  modified_base 21: mod_base = OTHER; note = 2-O-methyl modified nucleoside
  modified_base 1^2: mod_base = OTHER; note = phosphorothioate linkage
  modified_base 3^4: mod_base = OTHER; note = phosphorothioate linkage
  modified_base 19^20: mod_base = OTHER; note = phosphorothioate linkage
  modified_base 20^21: mod_base = OTHER; note = phosphorothioate linkage
gaagattcatttgataagatt

SEQ ID NO: 3643 - RNA, 21 nt, synthetic construct
  source 1..21: mol_type = other RNA
  modified_base 1: mod_base = OTHER; note = GalNAc; note = 2-O-methyl modified nucleoside
  modified_base 5: mod_base = OTHER; note = 2-fluoro-modified nucleoside
  modified_base 6: mod_base = OTHER; note = 2-fluoro-modified nucleoside
  modified_base 8: mod_base = OTHER; note = 2-fluoro-modified nucleoside
  modified_base 9: mod_base = OTHER; note = 2-fluoro-modified nucleoside
  modified_base 14: mod_base = OTHER; note = 2-fluoro-modified nucleoside
  modified_base 15: mod_base = OTHER; note = 2-O-methyl modified nucleoside
  modified_base 2: mod_base = OTHER; note = 2-O-methyl modified nucleoside
  modified_base 3: mod_base = OTHER; note = 2-O-methyl modified nucleoside
  modified_base 4: mod_base = OTHER; note = 2-O-methyl modified nucleoside
  modified_base 10: mod_base = OTHER; note = 2-O-methyl modified nucleoside
  modified_base 11: mod_base = OTHER; note = 2-O-methyl modified nucleoside
  modified_base 12: mod_base = OTHER; note = 2-O-methyl modified nucleoside
  modified_base 16: mod_base = OTHER; note = 2-O-methyl modified nucleoside
  modified_base 17: mod_base = OTHER; note = 2-fluoro-modified nucleoside
  modified_base 18: mod_base = OTHER; note = 2-O-methyl modified nucleoside
  modified_base 19: mod_base = OTHER; note = 2-O-methyl modified nucleoside
  modified_base 20: mod_base = OTHER; note = 2-O-methyl modified nucleoside
  modified_base 21: mod_base = OTHER; note = 2-O-methyl modified nucleoside
  modified_base 13: mod_base = OTHER; note = 2-O-methyl modified nucleoside
  modified_base 1^2: mod_base = OTHER; note = phosphorothioate linkage
  modified_base 2^3: mod_base = OTHER; note = phosphorothioate linkage
  modified_base 19^20: mod_base = OTHER; note = phosphorothioate linkage
  modified_base 20^21: mod_base = OTHER; note = phosphorothioate linkage
gatgaaagattcggtagtatt

SEQ ID NO: 3644 - RNA, 21 nt, synthetic construct
  source 1..21: mol_type = other RNA
  modified_base 1: mod_base = OTHER; note = GalNAc; note = 2-O-methyl modified nucleoside
  modified_base 5: mod_base = OTHER; note = 2-fluoro-modified nucleoside
  modified_base 6: mod_base = OTHER; note = 2-fluoro-modified nucleoside
  modified_base 9: mod_base = OTHER; note = 2-fluoro-modified nucleoside
  modified_base 11: mod_base = OTHER; note = 2-fluoro-modified nucleoside
  modified_base 12: mod_base = OTHER; note = 2-fluoro-modified nucleoside
  modified_base 15: mod_base = OTHER; note = 2-fluoro-modified nucleoside
  modified_base 8: mod_base = OTHER; note = any deoxynucleotide
  modified_base 2: mod_base = OTHER; note = 2-O-methyl modified nucleoside
  modified_base 3: mod_base = OTHER; note = 2-O-methyl modified nucleoside
  modified_base 4: mod_base = OTHER; note = 2-O-methyl modified nucleoside
  modified_base 7: mod_base = OTHER; note = 2-O-methyl modified nucleoside
  modified_base 10: mod_base = OTHER; note = 2-O-methyl modified nucleoside
  modified_base 13: mod_base = OTHER; note = 2-O-methyl modified nucleoside
  modified_base 14: mod_base = OTHER; note = 2-O-methyl modified nucleoside
  modified_base 16: mod_base = OTHER; note = 2-O-methyl modified nucleoside
  modified_base 17: mod_base = OTHER; note = 2-O-methyl modified nucleoside
  modified_base 18: mod_base = OTHER; note = 2-O-methyl modified nucleoside
  modified_base 20: mod_base = OTHER; note = 2-O-methyl modified nucleoside
  modified_base 19: mod_base = OTHER; note = 2-O-methyl modified nucleoside
  modified_base 21: mod_base = OTHER; note = 2-O-methyl modified nucleoside
  modified_base 1^2: mod_base = OTHER; note = phosphorothioate linkage
  modified_base 2^3: mod_base = OTHER; note = phosphorothioate linkage
  modified_base 19^20: mod_base = OTHER; note = phosphorothioate linkage
  modified_base 20^21: mod_base = OTHER; note = phosphorothioate linkage
gatgaaagattcggtagtatt

SEQ ID NO: 3645 - RNA, 21 nt, synthetic construct
  source 1..21: mol_type = other RNA
  modified_base 1: mod_base = OTHER; note = GalNAc; note = 2-O-methyl modified nucleoside
  modified_base 3: mod_base = OTHER; note = 2-fluoro-modified nucleoside
  modified_base 4: mod_base = OTHER; note = 2-fluoro-modified nucleoside
  modified_base 9: mod_base = OTHER; note = 2-fluoro-modified nucleoside
  modified_base 14: mod_base = OTHER; note = 2-fluoro-modified nucleoside
  modified_base 16: mod_base = OTHER; note = 2-fluoro-modified nucleoside
  modified_base 17: mod_base = OTHER; note = 2-fluoro-modified nucleoside
  modified_base 2: mod_base = OTHER; note = 2-O-methyl modified nucleoside
  modified_base 5: mod_base = OTHER; note = 2-O-methyl modified nucleoside
  modified_base 6: mod_base = OTHER; note = 2-O-methyl modified nucleoside
  modified_base 7: mod_base = OTHER; note = 2-O-methyl modified nucleoside
  modified_base 8: mod_base = OTHER; note = 2-O-methyl modified nucleoside
  modified_base 10: mod_base = OTHER; note = 2-O-methyl modified nucleoside
  modified_base 11: mod_base = OTHER; note = 2-O-methyl modified nucleoside
  modified_base 12: mod_base = OTHER; note = 2-O-methyl modified nucleoside
  modified_base 13: mod_base = OTHER; note = 2-O-methyl modified nucleoside
  modified_base 15: mod_base = OTHER; note = 2-O-methyl modified nucleoside
  modified_base 18: mod_base = OTHER; note = 2-O-methyl modified nucleoside
  modified_base 19: mod_base = OTHER; note = 2-O-methyl modified nucleoside
  modified_base 20: mod_base = OTHER; note = 2-O-methyl modified nucleoside
  modified_base 21: mod_base = OTHER; note = 2-O-methyl modified nucleoside
  modified_base 1^2: mod_base = OTHER; note = phosphorothioate linkage
  modified_base 2^3: mod_base = OTHER; note = phosphorothioate linkage
  modified_base 19^20: mod_base = OTHER; note = phosphorothioate linkage
  modified_base 20^21: mod_base = OTHER; note = phosphorothioate linkage
gaagattcatttgataagatt

SEQ ID NO: 3646 - RNA, 21 nt, synthetic construct
  source 1..21: mol_type = other RNA
  modified_base 1: mod_base = OTHER; note = 2-O-methyl modified nucleoside; note = GalNAc
  modified_base 8: mod_base = OTHER; note = any deoxynucleotide
  modified_base 3: mod_base = OTHER; note = 2-fluoro-modified nucleoside
  modified_base 5: mod_base = OTHER; note = 2-fluoro-modified nucleoside
  modified_base 7: mod_base = OTHER; note = 2-fluoro-modified nucleoside
  modified_base 9: mod_base = OTHER; note = 2-fluoro-modified nucleoside
  modified_base 11: mod_base = OTHER; note = 2-fluoro-modified nucleoside
  modified_base 12: mod_base = OTHER; note = 2-fluoro-modified nucleoside
  modified_base 15: mod_base = OTHER; note = 2-fluoro-modified nucleoside
  modified_base 2: mod_base = OTHER; note = 2-O-methyl modified nucleoside
  modified_base 4: mod_base = OTHER; note = 2-O-methyl modified nucleoside
  modified_base 6: mod_base = OTHER; note = 2-O-methyl modified nucleoside
  modified_base 10: mod_base = OTHER; note = 2-O-methyl modified nucleoside
  modified_base 13: mod_base = OTHER; note = 2-O-methyl modified nucleoside
  modified_base 14: mod_base = OTHER; note = 2-O-methyl modified nucleoside
  modified_base 16: mod_base = OTHER; note = 2-O-methyl modified nucleoside
  modified_base 17: mod_base = OTHER; note = 2-O-methyl modified nucleoside
  modified_base 18: mod_base = OTHER; note = 2-O-methyl modified nucleoside
  modified_base 19: mod_base = OTHER; note = 2-O-methyl modified nucleoside
  modified_base 20: mod_base = OTHER; note = 2-O-methyl modified nucleoside
  modified_base 21: mod_base = OTHER; note = 2-O-methyl modified nucleoside
  modified_base 1^2: mod_base = OTHER; note = phosphorothioate linkage
  modified_base 2^3: mod_base = OTHER; note = phosphorothioate linkage
  modified_base 19^20: mod_base = OTHER; note = phosphorothioate linkage
  modified_base 20^21: mod_base = OTHER; note = phosphorothioate linkage
gaagattcatttgataagatt

SEQ ID NO: 3647 - RNA, 21 nt, synthetic construct
  source 1..21: mol_type = other RNA
  modified_base 1: mod_base = OTHER; note = 2-O-methyl modified nucleoside; note = GalNAc
  modified_base 5: mod_base = OTHER; note = 2-fluoro-modified nucleoside
  modified_base 7: mod_base = OTHER; note = 2-fluoro-modified nucleoside
  modified_base 8: mod_base = OTHER; note = 2-fluoro-modified nucleoside
  modified_base 9: mod_base = OTHER; note = 2-fluoro-modified nucleoside
  modified_base 10: mod_base = OTHER; note = 2-fluoro-modified nucleoside
  modified_base 2: mod_base = OTHER; note = 2-O-methyl modified nucleoside
  modified_base 3: mod_base = OTHER; note = 2-O-methyl modified nucleoside
  modified_base 4: mod_base = OTHER; note = 2-O-methyl modified nucleoside
  modified_base 6: mod_base = OTHER; note = 2-O-methyl modified nucleoside
  modified_base 11: mod_base = OTHER; note = 2-O-methyl modified nucleoside
  modified_base 12: mod_base = OTHER; note = 2-O-methyl modified nucleoside
  modified_base 13: mod_base = OTHER; note = 2-O-methyl modified nucleoside
  modified_base 14: mod_base = OTHER; note = 2-O-methyl modified nucleoside
  modified_base 15: mod_base = OTHER; note = 2-O-methyl modified nucleoside
  modified_base 16: mod_base = OTHER; note = 2-O-methyl modified nucleoside
  modified_base 17: mod_base = OTHER; note = 2-O-methyl modified nucleoside
  modified_base 18: mod_base = OTHER; note = 2-O-methyl modified nucleoside
  modified_base 19: mod_base = OTHER; note = 2-O-methyl modified nucleoside
  modified_base 20: mod_base = OTHER; note = 2-O-methyl modified nucleoside
  modified_base 21: mod_base = OTHER; note = 2-O-methyl modified nucleoside
  modified_base 1^2: mod_base = OTHER; note = phosphorothioate linkage
  modified_base 2^3: mod_base = OTHER; note = phosphorothioate linkage
  modified_base 19^20: mod_base = OTHER; note = phosphorothioate linkage
  modified_base 20^21: mod_base = OTHER; note = phosphorothioate linkage
ctcaatggagtttattacatt

SEQ ID NO: 3648 - RNA, 21 nt, synthetic construct
  source 1..21: mol_type = other RNA
  modified_base 6: mod_base = OTHER; note = 2-fluoro-modified nucleoside
  modified_base 7: mod_base = OTHER; note = 2-fluoro-modified nucleoside
  modified_base 8: mod_base = OTHER; note = 2-fluoro-modified nucleoside
  modified_base 9: mod_base = OTHER; note = 2-fluoro-modified nucleoside
  modified_base 1: mod_base = OTHER; note = GalNAc; note = 2-O-methyl modified nucleoside
  modified_base 2: mod_base = OTHER; note = 2-O-methyl modified nucleoside
  modified_base 3: mod_base = OTHER; note = 2-O-methyl modified nucleoside
  modified_base 4: mod_base = OTHER; note = 2-O-methyl modified nucleoside
  modified_base 5: mod_base = OTHER; note = 2-O-methyl modified nucleoside
  modified_base 10: mod_base = OTHER; note = 2-O-methyl modified nucleoside
  modified_base 11: mod_base = OTHER; note = 2-O-methyl modified nucleoside
  modified_base 12: mod_base = OTHER; note = 2-O-methyl modified nucleoside
  modified_base 13: mod_base = OTHER; note = 2-O-methyl modified nucleoside
  modified_base 14: mod_base = OTHER; note = 2-O-methyl modified nucleoside
  modified_base 15: mod_base = OTHER; note = 2-O-methyl modified nucleoside
  modified_base 16: mod_base = OTHER; note = 2-O-methyl modified nucleoside
  modified_base 17: mod_base = OTHER; note = 2-O-methyl modified nucleoside
  modified_base 18: mod_base = OTHER; note = 2-O-methyl modified nucleoside
  modified_base 19: mod_base = OTHER; note = 2-O-methyl modified nucleoside
  modified_base 20: mod_base = OTHER; note = 2-O-methyl modified nucleoside
  modified_base 21: mod_base = OTHER; note = 2-O-methyl modified nucleoside
  modified_base 1^2: mod_base = OTHER; note = phosphorothioate linkage
  modified_base 2^3: mod_base = OTHER; note = phosphorothioate linkage
  modified_base 19^20: mod_base = OTHER; note = phosphorothioate linkage
  modified_base 20^21: mod_base = OTHER; note = phosphorothioate linkage
tcaatggagtttattaccatt

SEQ ID NO: 3649 - RNA, 21 nt, synthetic construct
  source 1..21: mol_type = other RNA
  modified_base 1: mod_base = OTHER; note = GalNAc; note = 2-O-methyl modified nucleoside
  modified_base 5: mod_base = OTHER; note = 2-fluoro-modified nucleoside
  modified_base 6: mod_base = OTHER; note = 2-fluoro-modified nucleoside
  modified_base 8: mod_base = OTHER; note = 2-fluoro-modified nucleoside
  modified_base 9: mod_base = OTHER; note = 2-fluoro-modified nucleoside
  modified_base 2: mod_base = OTHER; note = 2-O-methyl modified nucleoside
  modified_base 3: mod_base = OTHER; note = 2-O-methyl modified nucleoside
  modified_base 7: mod_base = OTHER; note = 2-O-methyl modified nucleoside
  modified_base 10: mod_base = OTHER; note = 2-O-methyl modified nucleoside
  modified_base 11: mod_base = OTHER; note = 2-O-methyl modified nucleoside
  modified_base 12: mod_base = OTHER; note = 2-O-methyl modified nucleoside
  modified_base 13: mod_base = OTHER; note = 2-O-methyl modified nucleoside
  modified_base 14: mod_base = OTHER; note = 2-O-methyl modified nucleoside
  modified_base 15: mod_base = OTHER; note = 2-O-methyl modified nucleoside
  modified_base 16: mod_base = OTHER; note = 2-O-methyl modified nucleoside
  modified_base 17: mod_base = OTHER; note = 2-O-methyl modified nucleoside
  modified_base 18: mod_base = OTHER; note = 2-O-methyl modified nucleoside
  modified_base 19: mod_base = OTHER; note = 2-O-methyl modified nucleoside
  modified_base 20: mod_base = OTHER; note = 2-O-methyl modified nucleoside
  modified_base 21: mod_base = OTHER; note = 2-O-methyl modified nucleoside
  modified_base 4: mod_base = OTHER; note = 2-O-methyl modified nucleoside
  modified_base 1^2: mod_base = OTHER; note = phosphorothioate linkage
  modified_base 2^3: mod_base = OTHER; note = phosphorothioate linkage
  modified_base 19^20: mod_base = OTHER; note = phosphorothioate linkage
  modified_base 20^21: mod_base = OTHER; note = phosphorothioate linkage
gatgaaagattcggtagtatt

SEQ ID NO: 3650 - RNA, 21 nt, synthetic construct
  source 1..21: mol_type = other RNA
  modified_base 1: mod_base = OTHER; note = 2-O-methyl modified nucleoside; note = GalNAc
  modified_base 5: mod_base = OTHER; note = 2-fluoro-modified nucleoside
  modified_base 6: mod_base = OTHER; note = 2-fluoro-modified nucleoside
  modified_base 8: mod_base = OTHER; note = 2-fluoro-modified nucleoside
  modified_base 9: mod_base = OTHER; note = 2-fluoro-modified nucleoside
  modified_base 2: mod_base = OTHER; note = 2-O-methyl modified nucleoside
  modified_base 3: mod_base = OTHER; note = 2-O-methyl modified nucleoside
  modified_base 4: mod_base = OTHER; note = 2-O-methyl modified nucleoside
  modified_base 7: mod_base = OTHER; note = 2-O-methyl modified nucleoside
  modified_base 10: mod_base = OTHER; note = 2-O-methyl modified nucleoside
  modified_base 11: mod_base = OTHER; note = 2-O-methyl modified nucleoside
  modified_base 12: mod_base = OTHER; note = 2-O-methyl modified nucleoside
  modified_base 13: mod_base = OTHER; note = 2-O-methyl modified nucleoside
  modified_base 14: mod_base = OTHER; note = 2-O-methyl modified nucleoside
  modified_base 15: mod_base = OTHER; note = 2-O-methyl modified nucleoside
  modified_base 16: mod_base = OTHER; note = 2-O-methyl modified nucleoside
  modified_base 17: mod_base = OTHER; note = 2-O-methyl modified nucleoside
  modified_base 18: mod_base = OTHER; note = 2-O-methyl modified nucleoside
  modified_base 19: mod_base = OTHER; note = 2-O-methyl modified nucleoside
  modified_base 20: mod_base = OTHER; note = 2-O-methyl modified nucleoside
  modified_base 21: mod_base = OTHER; note = 2-O-methyl modified nucleoside
  modified_base 1^2: mod_base = OTHER; note = phosphorothioate linkage
  modified_base 2^3: mod_base = OTHER; note = phosphorothioate linkage
  modified_base 19^20: mod_base = OTHER; note = phosphorothioate linkage
  modified_base 20^21: mod_base = OTHER; note = phosphorothioate linkage
gatgaaagattcggtagtatt

SEQ ID NO: 3651 - RNA, 21 nt, synthetic construct
  source 1..21: mol_type = other RNA
  modified_base 1: mod_base = OTHER; note = 2-O-methyl modified nucleoside; note = GalNAc
  modified_base 5: mod_base = OTHER; note = 2-fluoro-modified nucleoside
  modified_base 9: mod_base = OTHER; note = 2-fluoro-modified nucleoside
  modified_base 2: mod_base = OTHER; note = 2-O-methyl modified nucleoside
  modified_base 3: mod_base = OTHER; note = 2-O-methyl modified nucleoside
  modified_base 4: mod_base = OTHER; note = 2-O-methyl modified nucleoside
  modified_base 6: mod_base = OTHER; note = 2-O-methyl modified nucleoside
  modified_base 7: mod_base = OTHER; note = 2-O-methyl modified nucleoside
  modified_base 8: mod_base = OTHER; note = 2-O-methyl modified nucleoside
  modified_base 10: mod_base = OTHER; note = 2-O-methyl modified nucleoside
  modified_base 11: mod_base = OTHER; note = 2-O-methyl modified nucleoside
  modified_base 12: mod_base = OTHER; note = 2-O-methyl modified nucleoside
  modified_base 13: mod_base = OTHER; note = 2-O-methyl modified nucleoside
  modified_base 14: mod_base = OTHER; note = 2-O-methyl modified nucleoside
  modified_base 15: mod_base = OTHER; note = 2-O-methyl modified nucleoside
  modified_base 16: mod_base = OTHER; note = 2-O-methyl modified nucleoside
  modified_base 17: mod_base = OTHER; note = 2-O-methyl modified nucleoside
  modified_base 18: mod_base = OTHER; note = 2-O-methyl modified nucleoside
  modified_base 19: mod_base = OTHER; note = 2-O-methyl modified nucleoside
  modified_base 20: mod_base = OTHER; note = 2-O-methyl modified nucleoside
  modified_base 21: mod_base = OTHER; note = 2-O-methyl modified nucleoside
  modified_base 1^2: mod_base = OTHER; note = phosphorothioate linkage
  modified_base 2^3: mod_base = OTHER; note = phosphorothioate linkage
  modified_base 19^20: mod_base = OTHER; note = phosphorothioate linkage
  modified_base 20^21: mod_base = OTHER; note = phosphorothioate linkage
gaagattcatttgataagatt

SEQ ID NO: 3652 - RNA, 21 nt, synthetic construct
  source 1..21: mol_type = other RNA
  modified_base 1: mod_base = OTHER; note = 2-O-methyl modified nucleoside; note = GalNAc
  modified_base 5: mod_base = OTHER; note = 2-fluoro-modified nucleoside
  modified_base 6: mod_base = OTHER; note = 2-fluoro-modified nucleoside
  modified_base 8: mod_base = OTHER; note = 2-fluoro-modified nucleoside
  modified_base 9: mod_base = OTHER; note = 2-fluoro-modified nucleoside
  modified_base 2: mod_base = OTHER; note = 2-O-methyl modified nucleoside
  modified_base 3: mod_base = OTHER; note = 2-O-methyl modified nucleoside
  modified_base 4: mod_base = OTHER; note = 2-O-methyl modified nucleoside
  modified_base 7: mod_base = OTHER; note = 2-O-methyl modified nucleoside
  modified_base 10: mod_base = OTHER; note = 2-O-methyl modified nucleoside
  modified_base 11: mod_base = OTHER; note = 2-O-methyl modified nucleoside
  modified_base 12: mod_base = OTHER; note = 2-O-methyl modified nucleoside
  modified_base 13: mod_base = OTHER; note = 2-O-methyl modified nucleoside
  modified_base 14: mod_base = OTHER; note = 2-O-methyl modified nucleoside
  modified_base 15: mod_base = OTHER; note = 2-O-methyl modified nucleoside
  modified_base 16: mod_base = OTHER; note = 2-O-methyl modified nucleoside
  modified_base 17: mod_base = OTHER; note = 2-O-methyl modified nucleoside
  modified_base 18: mod_base = OTHER; note = 2-O-methyl modified nucleoside
  modified_base 19: mod_base = OTHER; note = 2-O-methyl modified nucleoside
  modified_base 20: mod_base = OTHER; note = 2-O-methyl modified nucleoside
  modified_base 21: mod_base = OTHER; note = 2-O-methyl modified nucleoside
  modified_base 1^2: mod_base = OTHER; note = phosphorothioate linkage
  modified_base 2^3: mod_base = OTHER; note = phosphorothioate linkage
  modified_base 19^20: mod_base = OTHER; note = phosphorothioate linkage
  modified_base 20^21: mod_base = OTHER; note = phosphorothioate linkage
gatgaaagattcggtagtatt

SEQ ID NO: 3653 - RNA, 21 nt, synthetic construct
  source 1..21: mol_type = other RNA
  modified_base 1: mod_base = OTHER; note = GalNAc; note = 2-O-methyl modified nucleoside
  modified_base 5: mod_base = OTHER; note = 2-fluoro-modified nucleoside
  modified_base 6: mod_base = OTHER; note = 2-fluoro-modified nucleoside
  modified_base 8: mod_base = OTHER; note = 2-fluoro-modified nucleoside
  modified_base 9: mod_base = OTHER; note = 2-fluoro-modified nucleoside
  modified_base 2: mod_base = OTHER; note = 2-O-methyl modified nucleoside
  modified_base 3: mod_base = OTHER; note = 2-O-methyl modified nucleoside
  modified_base 4: mod_base = OTHER; note = 2-O-methyl modified nucleoside
  modified_base 7: mod_base = OTHER; note = 2-O-methyl modified nucleoside
  modified_base 10: mod_base = OTHER; note = 2-O-methyl modified nucleoside
  modified_base 11: mod_base = OTHER; note = 2-O-methyl modified nucleoside
  modified_base 12: mod_base = OTHER; note = 2-O-methyl modified nucleoside
  modified_base 13: mod_base = OTHER; note = 2-O-methyl modified nucleoside
  modified_base 14: mod_base = OTHER; note = 2-O-methyl modified nucleoside
  modified_base 15: mod_base = OTHER; note = 2-O-methyl modified nucleoside
  modified_base 16: mod_base = OTHER; note = 2-O-methyl modified nucleoside
  modified_base 17: mod_base = OTHER; note = 2-O-methyl modified nucleoside
  modified_base 18: mod_base = OTHER; note = 2-O-methyl modified nucleoside
  modified_base 19: mod_base = OTHER; note = 2-O-methyl modified nucleoside
  modified_base 20: mod_base = OTHER; note = 2-O-methyl modified nucleoside
  modified_base 21: mod_base = OTHER; note = 2-O-methyl modified nucleoside
  modified_base 1^2: mod_base = OTHER; note = phosphorothioate linkage
  modified_base 2^3: mod_base = OTHER; note = phosphorothioate linkage
  modified_base 19^20: mod_base = OTHER; note = phosphorothioate linkage
  modified_base 20^21: mod_base = OTHER; note = phosphorothioate linkage
gatgaaagattcggtagtatt

SEQ ID NO: 3654 - RNA, 21 nt, synthetic construct
  source 1..21: mol_type = other RNA
  modified_base 1: mod_base = OTHER; note = GalNAc; note = 2-O-methyl modified nucleoside
  modified_base 5: mod_base = OTHER; note = 2-fluoro-modified nucleoside
  modified_base 6: mod_base = OTHER; note = 2-fluoro-modified nucleoside
  modified_base 8: mod_base = OTHER; note = 2-fluoro-modified nucleoside
  modified_base 9: mod_base = OTHER; note = 2-fluoro-modified nucleoside
  modified_base 2: mod_base = OTHER; note = 2-O-methyl modified nucleoside
  modified_base 3: mod_base = OTHER; note = 2-O-methyl modified nucleoside
  modified_base 4: mod_base = OTHER; note = 2-O-methyl modified nucleoside
  modified_base 7: mod_base = OTHER; note = 2-O-methyl modified nucleoside
  modified_base 10: mod_base = OTHER; note = 2-O-methyl modified nucleoside
  modified_base 11: mod_base = OTHER; note = 2-O-methyl modified nucleoside
  modified_base 12: mod_base = OTHER; note = 2-O-methyl modified nucleoside
  modified_base 13: mod_base = OTHER; note = 2-O-methyl modified nucleoside
  modified_base 14: mod_base = OTHER; note = 2-O-methyl modified nucleoside
  modified_base 15: mod_base = OTHER; note = 2-O-methyl modified nucleoside
  modified_base 16: mod_base = OTHER; note = 2-O-methyl modified nucleoside
  modified_base 17: mod_base = OTHER; note = 2-O-methyl modified nucleoside
  modified_base 18: mod_base = OTHER; note = 2-O-methyl modified nucleoside
  modified_base 19: mod_base = OTHER; note = 2-O-methyl modified nucleoside
  modified_base 20: mod_base = OTHER; note = 2-O-methyl modified nucleoside
  modified_base 21: mod_base = OTHER; note = 2-O-methyl modified nucleoside
  modified_base 1^2: mod_base = OTHER; note = phosphorothioate linkage
  modified_base 2^3: mod_base = OTHER; note = phosphorothioate linkage
  modified_base 19^20: mod_base = OTHER; note = phosphorothioate linkage
  modified_base 20^21: mod_base = OTHER; note = phosphorothioate linkage
gatgaaagattcggtagtatt

SEQ ID NO: 3655 - RNA, 21 nt, synthetic construct
  source 1..21: mol_type = other RNA
  modified_base 1: mod_base = OTHER; note = 2-O-methyl modified nucleoside; note = GalNAc
  modified_base 6: mod_base = OTHER; note = 2-fluoro-modified nucleoside
  modified_base 7: mod_base = OTHER; note = 2-fluoro-modified nucleoside
  modified_base 9: mod_base = OTHER; note = 2-fluoro-modified nucleoside
  modified_base 2: mod_base = OTHER; note = 2-O-methyl modified nucleoside
  modified_base 3: mod_base = OTHER; note = 2-O-methyl modified nucleoside
  modified_base 4: mod_base = OTHER; note = 2-O-methyl modified nucleoside
  modified_base 5: mod_base = OTHER; note = 2-O-methyl modified nucleoside
  modified_base 8: mod_base = OTHER; note = 2-O-methyl modified nucleoside
  modified_base 10: mod_base = OTHER; note = 2-O-methyl modified nucleoside
  modified_base 11: mod_base = OTHER; note = 2-O-methyl modified nucleoside
  modified_base 12: mod_base = OTHER; note = 2-O-methyl modified nucleoside
  modified_base 13: mod_base = OTHER; note = 2-O-methyl modified nucleoside
  modified_base 14: mod_base = OTHER; note = 2-O-methyl modified nucleoside
  modified_base 15: mod_base = OTHER; note = 2-O-methyl modified nucleoside
  modified_base 16: mod_base = OTHER; note = 2-O-methyl modified nucleoside
  modified_base 17: mod_base = OTHER; note = 2-O-methyl modified nucleoside
  modified_base 18: mod_base = OTHER; note = 2-O-methyl modified nucleoside
  modified_base 19: mod_base = OTHER; note = 2-O-methyl modified nucleoside
  modified_base 20: mod_base = OTHER; note = 2-O-methyl modified nucleoside
  modified_base 21: mod_base = OTHER; note = 2-O-methyl modified nucleoside
  modified_base 1^2: mod_base = OTHER; note = phosphorothioate linkage
  modified_base 2^3: mod_base = OTHER; note = phosphorothioate linkage
  modified_base 19^20: mod_base = OTHER; note = phosphorothioate linkage
  modified_base 20^21: mod_base = OTHER; note = phosphorothioate linkage
agacatcatgagttggtcatt

SEQ ID NO: 3656 - RNA, 21 nt, synthetic construct
  source 1..21: mol_type = other RNA
  modified_base 1: mod_base = OTHER; note = GalNAc; note = 2-O-methyl modified nucleoside
  modified_base 6: mod_base = OTHER; note = 2-fluoro-modified nucleoside
  modified_base 7: mod_base = OTHER; note = 2-fluoro-modified nucleoside
  modified_base 8: mod_base = OTHER; note = 2-fluoro-modified nucleoside
  modified_base 9: mod_base = OTHER; note = 2-fluoro-modified nucleoside
  modified_base 11: mod_base = OTHER; note = 2-fluoro-modified nucleoside
  modified_base 2: mod_base = OTHER; note = 2-O-methyl modified nucleoside
  modified_base 3: mod_base = OTHER; note = 2-O-methyl modified nucleoside
  modified_base 4: mod_base = OTHER; note = 2-O-methyl modified nucleoside
  modified_base 5: mod_base = OTHER; note = 2-O-methyl modified nucleoside
  modified_base 10: mod_base = OTHER; note = 2-O-methyl modified nucleoside
  modified_base 12: mod_base = OTHER; note = 2-O-methyl modified nucleoside
  modified_base 13: mod_base = OTHER; note = 2-O-methyl modified nucleoside
  modified_base 14: mod_base = OTHER; note = 2-O-methyl modified nucleoside
  modified_base 15: mod_base = OTHER; note = 2-O-methyl modified nucleoside
  modified_base 16: mod_base = OTHER; note = 2-O-methyl modified nucleoside
  modified_base 17: mod_base = OTHER; note = 2-O-methyl modified nucleoside
  modified_base 18: mod_base = OTHER; note = 2-O-methyl modified nucleoside
  modified_base 19: mod_base = OTHER; note = 2-O-methyl modified nucleoside
  modified_base 20: mod_base = OTHER; note = 2-O-methyl modified nucleoside
  modified_base 21: mod_base = OTHER; note = 2-O-methyl modified nucleoside
  modified_base 1^2: mod_base = OTHER; note = phosphorothioate linkage
  modified_base 2^3: mod_base = OTHER; note = phosphorothioate linkage
  modified_base 19^20: mod_base = OTHER; note = phosphorothioate linkage
  modified_base 20^21: mod_base = OTHER; note = phosphorothioate linkage
agactggaatggcagaacatt

SEQ ID NO: 3657 - RNA, 21 nt, synthetic construct
  source 1..21: mol_type = other RNA
  modified_base 1: mod_base = OTHER; note = GalNAc; note = 2-O-methyl modified nucleoside
  modified_base 8: mod_base = OTHER; note = 2-fluoro-modified nucleoside
  modified_base 9: mod_base = OTHER; note = 2-fluoro-modified nucleoside
  modified_base 10: mod_base = OTHER; note = 2-fluoro-modified nucleoside
  modified_base 11: mod_base = OTHER; note = 2-fluoro-modified nucleoside
  modified_base 2: mod_base = OTHER; note = 2-O-methyl modified nucleoside
  modified_base 3: mod_base = OTHER; note = 2-O-methyl modified nucleoside
  modified_base 4: mod_base = OTHER; note = 2-O-methyl modified nucleoside
  modified_base 5: mod_base = OTHER; note = 2-O-methyl modified nucleoside
  modified_base 6: mod_base = OTHER; note = 2-O-methyl modified nucleoside
  modified_base 7: mod_base = OTHER; note = 2-O-methyl modified nucleoside
  modified_base 12: mod_base = OTHER; note = 2-O-methyl modified nucleoside
  modified_base 13: mod_base = OTHER; note = 2-O-methyl modified nucleoside
  modified_base 14: mod_base = OTHER; note = 2-O-methyl modified nucleoside
  modified_base 15: mod_base = OTHER; note = 2-O-methyl modified nucleoside
  modified_base 16: mod_base = OTHER; note = 2-O-methyl modified nucleoside
  modified_base 17: mod_base = OTHER; note = 2-O-methyl modified nucleoside
  modified_base 18: mod_base = OTHER; note = 2-O-methyl modified nucleoside
  modified_base 19: mod_base = OTHER; note = 2-O-methyl modified nucleoside
  modified_base 20: mod_base = OTHER; note = 2-O-methyl modified nucleoside
  modified_base 21: mod_base = OTHER; note = 2-O-methyl modified nucleoside
  modified_base 1^2: mod_base = OTHER; note = phosphorothioate linkage
  modified_base 2^3: mod_base = OTHER; note = phosphorothioate linkage
  modified_base 19^20: mod_base = OTHER; note = phosphorothioate linkage
  modified_base 20^21: mod_base = OTHER; note = phosphorothioate linkage
tgacaagtttttcacatcatt

SEQ ID NO: 3658 - RNA, 21 nt, synthetic construct
  source 1..21: mol_type = other RNA
  modified_base 1: mod_base = OTHER; note = 2-O-methyl modified nucleoside; note = GalNAc
  modified_base 8: mod_base = OTHER; note = 2-fluoro-modified nucleoside
  modified_base 9: mod_base = OTHER; note = 2-fluoro-modified nucleoside
  modified_base 10: mod_base = OTHER; note = 2-fluoro-modified nucleoside
  modified_base 11: mod_base = OTHER; note = 2-fluoro-modified nucleoside
  modified_base 2: mod_base = OTHER; note = 2-O-methyl modified nucleoside
  modified_base 3: mod_base = OTHER; note = 2-O-methyl modified nucleoside
  modified_base 4: mod_base = OTHER; note = 2-O-methyl modified nucleoside
  modified_base 5: mod_base = OTHER; note = 2-O-methyl modified nucleoside
  modified_base 6: mod_base = OTHER; note = 2-O-methyl modified nucleoside
  modified_base 7: mod_base = OTHER; note = 2-O-methyl modified nucleoside
  modified_base 12: mod_base = OTHER; note = 2-O-methyl modified nucleoside
  modified_base 13: mod_base = OTHER; note = 2-O-methyl modified nucleoside
  modified_base 14: mod_base = OTHER; note = 2-O-methyl modified nucleoside
  modified_base 15: mod_base = OTHER; note = 2-O-methyl modified nucleoside
  modified_base 16: mod_base = OTHER; note = 2-O-methyl modified nucleoside
  modified_base 17: mod_base = OTHER; note = 2-O-methyl modified nucleoside
  modified_base 18: mod_base = OTHER; note = 2-O-methyl modified nucleoside
  modified_base 19: mod_base = OTHER; note = 2-O-methyl modified nucleoside
  modified_base 20: mod_base = OTHER; note = 2-O-methyl modified nucleoside
  modified_base 21: mod_base = OTHER; note = 2-O-methyl modified nucleoside
  modified_base 1^2: mod_base = OTHER; note = phosphorothioate linkage
  modified_base 2^3: mod_base = OTHER; note = phosphorothioate linkage
  modified_base 19^20: mod_base = OTHER; note = phosphorothioate linkage
  modified_base 20^21: mod_base = OTHER; note = phosphorothioate linkage
tgacaagtttttcacatcatt

SEQ ID NO: 3659 - RNA, 21 nt, synthetic construct
  source 1..21: mol_type = other RNA
  modified_base 1: mod_base = OTHER; note = 2-O-methyl modified nucleoside; note = GalNAc
  modified_base 7: mod_base = OTHER; note = 2-fluoro-modified nucleoside
  modified_base 8: mod_base = OTHER; note = 2-fluoro-modified nucleoside
  modified_base 9: mod_base = OTHER; note = 2-fluoro-modified nucleoside
  modified_base 10: mod_base = OTHER; note = 2-fluoro-modified nucleoside
  modified_base 11: mod_base = OTHER; note = 2-fluoro-modified nucleoside
  modified_base 2: mod_base = OTHER; note = 2-O-methyl modified nucleoside
  modified_base 3: mod_base = OTHER; note = 2-O-methyl modified nucleoside
  modified_base 4: mod_base = OTHER; note = 2-O-methyl modified nucleoside
  modified_base 5: mod_base = OTHER; note = 2-O-methyl modified nucleoside
  modified_base 6: mod_base = OTHER; note = 2-O-methyl modified nucleoside
  modified_base 12: mod_base = OTHER; note = 2-O-methyl modified nucleoside
  modified_base 13: mod_base = OTHER; note = 2-O-methyl modified nucleoside
  modified_base 14: mod_base = OTHER; note = 2-O-methyl modified nucleoside
  modified_base 15: mod_base = OTHER; note = 2-O-methyl modified nucleoside
  modified_base 16: mod_base = OTHER; note = 2-O-methyl modified nucleoside
  modified_base 17: mod_base = OTHER; note = 2-O-methyl modified nucleoside
  modified_base 18: mod_base = OTHER; note = 2-O-methyl modified nucleoside
  modified_base 19: mod_base = OTHER; note = 2-O-methyl modified nucleoside
  modified_base 20: mod_base = OTHER; note = 2-O-methyl modified nucleoside
  modified_base 21: mod_base = OTHER; note = 2-O-methyl modified nucleoside
  modified_base 1^2: mod_base = OTHER; note = phosphorothioate linkage
  modified_base 2^3: mod_base = OTHER; note = phosphorothioate linkage
  modified_base 19^20: mod_base = OTHER; note = phosphorothioate linkage
  modified_base 20^21: mod_base = OTHER; note = phosphorothioate linkage
gacaagtttttcacatccatt

SEQ ID NO: 3660 - RNA, 21 nt, synthetic construct
  source 1..21: mol_type = other RNA
  modified_base 1: mod_base = OTHER; note = 2-O-methyl modified nucleoside; note = GalNAc
  modified_base 5: mod_base = OTHER; note = 2-fluoro-modified nucleoside
  modified_base 6: mod_base = OTHER; note = 2-fluoro-modified nucleoside
  modified_base 8: mod_base = OTHER; note = 2-fluoro-modified nucleoside
  modified_base 9: mod_base = OTHER; note = 2-fluoro-modified nucleoside
  modified_base 11: mod_base = OTHER; note = 2-fluoro-modified nucleoside
  modified_base 2: mod_base = OTHER; note = 2-O-methyl modified nucleoside
  modified_base 3: mod_base = OTHER; note = 2-O-methyl modified nucleoside
  modified_base 4: mod_base = OTHER; note = 2-O-methyl modified nucleoside
  modified_base 7: mod_base = OTHER; note = 2-O-methyl modified nucleoside
  modified_base 10: mod_base = OTHER; note = 2-O-methyl modified nucleoside
  modified_base 12: mod_base = OTHER; note = 2-O-methyl modified nucleoside
  modified_base 13: mod_base = OTHER; note = 2-O-methyl modified nucleoside
  modified_base 14: mod_base = OTHER; note = 2-O-methyl modified nucleoside
  modified_base 15: mod_base = OTHER; note = 2-O-methyl modified nucleoside
  modified_base 16: mod_base = OTHER; note = 2-O-methyl modified nucleoside
  modified_base 17: mod_base = OTHER; note = 2-O-methyl modified nucleoside
  modified_base 18: mod_base = OTHER; note = 2-O-methyl modified nucleoside
  modified_base 19: mod_base = OTHER; note = 2-O-methyl modified nucleoside
  modified_base 20: mod_base = OTHER; note = 2-O-methyl modified nucleoside
  modified_base 21: mod_base = OTHER; note = 2-O-methyl modified nucleoside
  modified_base 1^2: mod_base = OTHER; note = phosphorothioate linkage
  modified_base 2^3: mod_base = OTHER; note = phosphorothioate linkage
  modified_base 19^20: mod_base = OTHER; note = phosphorothioate linkage
  modified_base 20^21: mod_base = OTHER; note = phosphorothioate linkage
gagtttattaccaaggtgatt

SEQ ID NO: 3661 - RNA, 21 nt, synthetic construct
  source 1..21: mol_type = other RNA
  modified_base 1: mod_base = OTHER; note = 2-O-methyl modified nucleoside; note = 2-O-methyl modified nucleoside
  modified_base 5: mod_base = OTHER; note = 2-fluoro-modified nucleoside
  modified_base 7: mod_base = OTHER; note = 2-fluoro-modified nucleoside
  modified_base 8: mod_base = OTHER; note = 2-fluoro-modified nucleoside
  modified_base 9: mod_base = OTHER; note = any deoxynucleotide
  modified_base 2: mod_base = OTHER; note = 2-O-methyl modified nucleoside
  modified_base 3: mod_base = OTHER; note = 2-O-methyl modified nucleoside
  modified_base 4: mod_base = OTHER; note = 2-O-methyl modified nucleoside
  modified_base 6: mod_base = OTHER; note = 2-O-methyl modified nucleoside
  modified_base 10: mod_base = OTHER; note = 2-O-methyl modified nucleoside
  modified_base 11: mod_base = OTHER; note = 2-O-methyl modified nucleoside
  modified_base 12: mod_base = OTHER; note = 2-O-methyl modified nucleoside
  modified_base 13: mod_base = OTHER; note = 2-O-methyl modified nucleoside
  modified_base 14: mod_base = OTHER; note = 2-O-methyl modified nucleoside
  modified_base 15: mod_base = OTHER; note = 2-O-methyl modified nucleoside
  modified_base 16: mod_base = OTHER; note = 2-O-methyl modified nucleoside
  modified_base 17: mod_base = OTHER; note = 2-O-methyl modified nucleoside
  modified_base 18: mod_base = OTHER; note = 2-O-methyl modified nucleoside
  modified_base 19: mod_base = OTHER; note = 2-O-methyl modified nucleoside
  modified_base 20: mod_base = OTHER; note = 2-O-methyl modified nucleoside
  modified_base 21: mod_base = OTHER; note = 2-O-methyl modified nucleoside
  modified_base 1^2: mod_base = OTHER; note = phosphorothioate linkage
  modified_base 2^3: mod_base = OTHER; note = phosphorothioate linkage
  modified_base 19^20: mod_base = OTHER; note = phosphorothioate linkage
  modified_base 20^21: mod_base = OTHER; note = phosphorothioate linkage
taccaaggtggcacttacatt

SEQ ID NO: 3662 - RNA, 21 nt, synthetic construct
  source 1..21: mol_type = other RNA
  modified_base 1: mod_base = OTHER; note = GalNAc; note = 2-O-methyl modified nucleoside
  modified_base 5: mod_base = OTHER; note = 2-fluoro-modified nucleoside
  modified_base 6: mod_base = OTHER; note = 2-fluoro-modified nucleoside
  modified_base 9: mod_base = OTHER; note = 2-fluoro-modified nucleoside
  modified_base 10: mod_base = OTHER; note = 2-fluoro-modified nucleoside
  modified_base 2: mod_base = OTHER; note = 2-O-methyl modified nucleoside
  modified_base 3: mod_base = OTHER; note = 2-O-methyl modified nucleoside
  modified_base 4: mod_base = OTHER; note = 2-O-methyl modified nucleoside
  modified_base 7: mod_base = OTHER; note = 2-O-methyl modified nucleoside
  modified_base 8: mod_base = OTHER; note = 2-O-methyl modified nucleoside
  modified_base 11: mod_base = OTHER; note = 2-O-methyl modified nucleoside
  modified_base 12: mod_base = OTHER; note = 2-O-methyl modified nucleoside
  modified_base 13: mod_base = OTHER; note = 2-O-methyl modified nucleoside
  modified_base 14: mod_base = OTHER; note = 2-O-methyl modified nucleoside
  modified_base 15: mod_base = OTHER; note = 2-O-methyl modified nucleoside
  modified_base 16: mod_base = OTHER; note = 2-O-methyl modified nucleoside
  modified_base 17: mod_base = OTHER; note = 2-O-methyl modified nucleoside
  modified_base 18: mod_base = OTHER; note = 2-O-methyl modified nucleoside
  modified_base 19: mod_base = OTHER; note = 2-O-methyl modified nucleoside
  modified_base 20: mod_base = OTHER; note = 2-O-methyl modified nucleoside
  modified_base 21: mod_base = OTHER; note = 2-O-methyl modified nucleoside
  modified_base 1^2: mod_base = OTHER; note = phosphorothioate linkage
  modified_base 2^3: mod_base = OTHER; note = phosphorothioate linkage
  modified_base 19^20: mod_base = OTHER; note = phosphorothioate linkage
  modified_base 20^21: mod_base = OTHER; note = phosphorothioate linkage
accaaggtggcacttactatt

SEQ ID NO: 3663 - RNA, 21 nt, synthetic construct
  source 1..21: mol_type = other RNA
  modified_base 1: mod_base = OTHER; note = 2-O-methyl modified nucleoside; note = GalNAc
  modified_base 6: mod_base = OTHER; note = 2-fluoro-modified nucleoside
  modified_base 7: mod_base = OTHER; note = 2-fluoro-modified nucleoside
  modified_base 9: mod_base = OTHER; note = 2-fluoro-modified nucleoside
  modified_base 2: mod_base = OTHER; note = 2-O-methyl modified nucleoside
  modified_base 3: mod_base = OTHER; note = 2-O-methyl modified nucleoside
  modified_base 4: mod_base = OTHER; note = 2-O-methyl modified nucleoside
  modified_base 5: mod_base = OTHER; note = 2-O-methyl modified nucleoside
  modified_base 8: mod_base = OTHER; note = 2-O-methyl modified nucleoside
  modified_base 10: mod_base = OTHER; note = 2-O-methyl modified nucleoside
  modified_base 11: mod_base = OTHER; note = 2-O-methyl modified nucleoside
  modified_base 12: mod_base = OTHER; note = 2-O-methyl modified nucleoside
  modified_base 13: mod_base = OTHER; note = 2-O-methyl modified nucleoside
  modified_base 14: mod_base = OTHER; note = 2-O-methyl modified nucleoside
  modified_base 15: mod_base = OTHER; note = 2-O-methyl modified nucleoside
  modified_base 16: mod_base = OTHER; note = 2-O-methyl modified nucleoside
  modified_base 17: mod_base = OTHER; note = 2-O-methyl modified nucleoside
  modified_base 18: mod_base = OTHER; note = 2-O-methyl modified nucleoside
  modified_base 19: mod_base = OTHER; note = 2-O-methyl modified nucleoside
  modified_base 20: mod_base = OTHER; note = 2-O-methyl modified nucleoside
  modified_base 21: mod_base = OTHER; note = 2-O-methyl modified nucleoside
  modified_base 1^2: mod_base = OTHER; note = phosphorothioate linkage
  modified_base 2^3: mod_base = OTHER; note = phosphorothioate linkage
  modified_base 19^20: mod_base = OTHER; note = phosphorothioate linkage
  modified_base 20^21: mod_base = OTHER; note = phosphorothioate linkage
aaggtggcacttactcaaatt

SEQ ID NO: 3664 - RNA, 21 nt, synthetic construct
  source 1..21: mol_type = other RNA
  modified_base 1: mod_base = OTHER; note = GalNAc; note = 2-O-methyl modified nucleoside
  modified_base 7: mod_base = OTHER; note = 2-fluoro-modified nucleoside
  modified_base 9: mod_base = OTHER; note = 2-fluoro-modified nucleoside
  modified_base 10: mod_base = OTHER; note = 2-fluoro-modified nucleoside
  modified_base 2: mod_base = OTHER; note = 2-O-methyl modified nucleoside
  modified_base 3: mod_base = OTHER; note = 2-O-methyl modified nucleoside
  modified_base 4: mod_base = OTHER; note = 2-O-methyl modified nucleoside
  modified_base 5: mod_base = OTHER; note = 2-O-methyl modified nucleoside
  modified_base 6: mod_base = OTHER; note = 2-O-methyl modified nucleoside
  modified_base 8: mod_base = OTHER; note = 2-O-methyl modified nucleoside
  modified_base 11: mod_base = OTHER; note = 2-O-methyl modified nucleoside
  modified_base 12: mod_base = OTHER; note = 2-O-methyl modified nucleoside
  modified_base 13: mod_base = OTHER; note = 2-O-methyl modified nucleoside
  modified_base 14: mod_base = OTHER; note = 2-O-methyl modified nucleoside
  modified_base 15: mod_base = OTHER; note = 2-O-methyl modified nucleoside
  modified_base 16: mod_base = OTHER; note = 2-O-methyl modified nucleoside
  modified_base 17: mod_base = OTHER; note = 2-O-methyl modified nucleoside
  modified_base 18: mod_base = OTHER; note = 2-O-methyl modified nucleoside
  modified_base 19: mod_base = OTHER; note = 2-O-methyl modified nucleoside
  modified_base 20: mod_base = OTHER; note = 2-O-methyl modified nucleoside
  modified_base 21: mod_base = OTHER; note = 2-O-methyl modified nucleoside
  modified_base 1^2: mod_base = OTHER; note = phosphorothioate linkage
  modified_base 2^3: mod_base = OTHER; note = phosphorothioate linkage
  modified_base 19^20: mod_base = OTHER; note = phosphorothioate linkage
  modified_base 20^21: mod_base = OTHER; note = phosphorothioate linkage
aggtggcacttactcaaaatt

SEQ ID NO: 3665 - RNA, 21 nt, synthetic construct
  source 1..21: mol_type = other RNA
  modified_base 1: mod_base = OTHER; note = GalNAc; note = 2-O-methyl modified nucleoside
  modified_base 5: mod_base = OTHER; note = 2-fluoro-modified nucleoside
  modified_base 6: mod_base = OTHER; note = 2-fluoro-modified nucleoside
  modified_base 8: mod_base = OTHER; note = 2-fluoro-modified nucleoside
  modified_base 9: mod_base = OTHER; note = 2-fluoro-modified nucleoside
  modified_base 2: mod_base = OTHER; note = 2-O-methyl modified nucleoside
  modified_base 3: mod_base = OTHER; note = 2-O-methyl modified nucleoside
  modified_base 4: mod_base = OTHER; note = 2-O-methyl modified nucleoside
  modified_base 8: mod_base = OTHER; note = 2-O-methyl modified nucleoside
  modified_base 11: mod_base = OTHER; note = 2-O-methyl modified nucleoside
  modified_base 12: mod_base = OTHER; note = 2-O-methyl modified nucleoside
  modified_base 13: mod_base = OTHER; note = 2-O-methyl modified nucleoside
  modified_base 14: mod_base = OTHER; note = 2-O-methyl modified nucleoside
  modified_base 15: mod_base = OTHER; note = 2-O-methyl modified nucleoside
  modified_base 16: mod_base = OTHER; note = 2-O-methyl modified nucleoside
  modified_base 17: mod_base = OTHER; note = 2-O-methyl modified nucleoside
  modified_base 18: mod_base = OTHER; note = 2-O-methyl modified nucleoside
  modified_base 19: mod_base = OTHER; note = 2-O-methyl modified nucleoside
  modified_base 20: mod_base = OTHER; note = 2-O-methyl modified nucleoside
  modified_base 21: mod_base = OTHER; note = 2-O-methyl modified nucleoside
  modified_base 1^2: mod_base = OTHER; note = phosphorothioate linkage
  modified_base 2^3: mod_base = OTHER; note = phosphorothioate linkage
  modified_base 19^20: mod_base = OTHER; note = phosphorothioate linkage
  modified_base 20^21: mod_base = OTHER; note = phosphorothioate linkage
gatgaaagattcggtagtatt

SEQ ID NO: 3666 - skipped

SEQ ID NO: 3667 - RNA, 21 nt, synthetic construct
  source 1..21: mol_type = other RNA
  modified_base 1: mod_base = OTHER; note = 2-O-methyl modified nucleoside; note = GalNAc
  modified_base 5: mod_base = OTHER; note = 2-fluoro-modified nucleoside
  modified_base 6: mod_base = OTHER; note = 2-fluoro-modified nucleoside
  modified_base 8: mod_base = OTHER; note = 2-fluoro-modified nucleoside
  modified_base 9: mod_base = OTHER; note = 2-fluoro-modified nucleoside
  modified_base 2: mod_base = OTHER; note = 2-O-methyl modified nucleoside
  modified_base 3: mod_base = OTHER; note = 2-O-methyl modified nucleoside
  modified_base 4: mod_base = OTHER; note = 2-O-methyl modified nucleoside
  modified_base 7: mod_base = OTHER; note = 2-O-methyl modified nucleoside
  modified_base 10: mod_base = OTHER; note = 2-O-methyl modified nucleoside
  modified_base 11: mod_base = OTHER; note = 2-O-methyl modified nucleoside
  modified_base 12: mod_base = OTHER; note = 2-O-methyl modified nucleoside
  modified_base 13: mod_base = OTHER; note = 2-O-methyl modified nucleoside
  modified_base 14: mod_base = OTHER; note = 2-O-methyl modified nucleoside
  modified_base 15: mod_base = OTHER; note = 2-O-methyl modified nucleoside
  modified_base 16: mod_base = OTHER; note = 2-O-methyl modified nucleoside
  modified_base 17: mod_base = OTHER; note = 2-O-methyl modified nucleoside
  modified_base 18: mod_base = OTHER; note = 2-O-methyl modified nucleoside
  modified_base 19: mod_base = OTHER; note = 2-O-methyl modified nucleoside
  modified_base 20: mod_base = OTHER; note = 2-O-methyl modified nucleoside
  modified_base 21: mod_base = OTHER; note = 2-O-methyl modified nucleoside
  modified_base 1^2: mod_base = OTHER; note = phosphorothioate linkage
  modified_base 2^3: mod_base = OTHER; note = phosphorothioate linkage
  modified_base 19^20: mod_base = OTHER; note = phosphorothioate linkage
  modified_base 20^21: mod_base = OTHER; note = phosphorothioate linkage
gatgaaagattcggtagtatt

SEQ ID NO: 3668 - RNA, 21 nt, synthetic construct
  source 1..21: mol_type = other RNA
  modified_base 1: mod_base = OTHER; note = GalNAc; note = 2-O-methyl modified nucleoside
  modified_base 5: mod_base = OTHER; note = 2-fluoro-modified nucleoside
  modified_base 6: mod_base = OTHER; note = 2-fluoro-modified nucleoside
  modified_base 8: mod_base = OTHER; note = 2-fluoro-modified nucleoside
  modified_base 9: mod_base = OTHER; note = 2-fluoro-modified nucleoside
  modified_base 2: mod_base = OTHER; note = 2-O-methyl modified nucleoside
  modified_base 3: mod_base = OTHER; note = 2-O-methyl modified nucleoside
  modified_base 4: mod_base = OTHER; note = 2-O-methyl modified nucleoside
  modified_base 7: mod_base = OTHER; note = 2-O-methyl modified nucleoside
  modified_base 10: mod_base = OTHER; note = 2-O-methyl modified nucleoside
  modified_base 11: mod_base = OTHER; note = 2-O-methyl modified nucleoside
  modified_base 12: mod_base = OTHER; note = 2-O-methyl modified nucleoside
  modified_base 13: mod_base = OTHER; note = 2-O-methyl modified nucleoside
  modified_base 14: mod_base = OTHER; note = 2-O-methyl modified nucleoside
  modified_base 15: mod_base = OTHER; note = 2-O-methyl modified nucleoside
  modified_base 16: mod_base = OTHER; note = 2-O-methyl modified nucleoside
  modified_base 17: mod_base = OTHER; note = 2-O-methyl modified nucleoside
  modified_base 18: mod_base = OTHER; note = 2-O-methyl modified nucleoside
  modified_base 19: mod_base = OTHER; note = 2-O-methyl modified nucleoside
  modified_base 20: mod_base = OTHER; note = 2-O-methyl modified nucleoside
  modified_base 21: mod_base = OTHER; note = 2-O-methyl modified nucleoside
  modified_base 1^2: mod_base = OTHER; note = phosphorothioate linkage
  modified_base 2^3: mod_base = OTHER; note = phosphorothioate linkage
  modified_base 19^20: mod_base = OTHER; note = phosphorothioate linkage
  modified_base 20^21: mod_base = OTHER; note = phosphorothioate linkage
gatgaaagattcggtagtatt

SEQ ID NO: 3669 - RNA, 21 nt, synthetic construct
  source 1..21: mol_type = other RNA
  modified_base 1: mod_base = OTHER; note = 2-O-methyl modified nucleoside; note = GalNAc
  modified_base 5: mod_base = OTHER; note = 2-fluoro-modified nucleoside
  modified_base 6: mod_base = OTHER; note = 2-fluoro-modified nucleoside
  modified_base 8: mod_base = OTHER; note = 2-fluoro-modified nucleoside
  modified_base 9: mod_base = OTHER; note = 2-fluoro-modified nucleoside
  modified_base 2: mod_base = OTHER; note = 2-O-methyl modified nucleoside
  modified_base 3: mod_base = OTHER; note = 2-O-methyl modified nucleoside
  modified_base 4: mod_base = OTHER; note = 2-O-methyl modified nucleoside
  modified_base 7: mod_base = OTHER; note = 2-O-methyl modified nucleoside
  modified_base 10: mod_base = OTHER; note = 2-O-methyl modified nucleoside
  modified_base 11: mod_base = OTHER; note = 2-O-methyl modified nucleoside
  modified_base 12: mod_base = OTHER; note = 2-O-methyl modified nucleoside
  modified_base 13: mod_base = OTHER; note = 2-O-methyl modified nucleoside
  modified_base 14: mod_base = OTHER; note = 2-O-methyl modified nucleoside
  modified_base 15: mod_base = OTHER; note = 2-O-methyl modified nucleoside
  modified_base 16: mod_base = OTHER; note = 2-O-methyl modified nucleoside
  modified_base 18: mod_base = OTHER; note = 2-O-methyl modified nucleoside
  modified_base 19: mod_base = OTHER; note = 2-O-methyl modified nucleoside
  modified_base 20: mod_base = OTHER; note = 2-O-methyl modified nucleoside
  modified_base 21: mod_base = OTHER; note = 2-O-methyl modified nucleoside
  modified_base 1^2: mod_base = OTHER; note = phosphorothioate linkage
  modified_base 2^3: mod_base = OTHER; note = phosphorothioate linkage
  modified_base 19^20: mod_base = OTHER; note = phosphorothioate linkage
  modified_base 20^21: mod_base = OTHER; note = phosphorothioate linkage
gatgaaagattcggtagtatt

SEQ ID NO: 3670 - RNA, 21 nt, synthetic construct
  source 1..21: mol_type = other RNA
  modified_base 1: mod_base = OTHER; note = GalNAc; note = 2-O-methyl modified nucleoside
  modified_base 8: mod_base = OTHER; note = 2-fluoro-modified nucleoside
  modified_base 9: mod_base = OTHER; note = 2-fluoro-modified nucleoside
  modified_base 11: mod_base = OTHER; note = 2-fluoro-modified nucleoside
  modified_base 2: mod_base = OTHER; note = 2-O-methyl modified nucleoside
  modified_base 3: mod_base = OTHER; note = 2-O-methyl modified nucleoside
  modified_base 4: mod_base = OTHER; note = 2-O-methyl modified nucleoside
  modified_base 7: mod_base = OTHER; note = 2-O-methyl modified nucleoside
  modified_base 10: mod_base = OTHER; note = 2-O-methyl modified nucleoside
  modified_base 12: mod_base = OTHER; note = 2-O-methyl modified nucleoside
  modified_base 13: mod_base = OTHER; note = 2-O-methyl modified nucleoside
  modified_base 15: mod_base = OTHER; note = 2-O-methyl modified nucleoside
  modified_base 14: mod_base = OTHER; note = 2-O-methyl modified nucleoside
  modified_base 16: mod_base = OTHER; note = 2-O-methyl modified nucleoside
  modified_base 17: mod_base = OTHER; note = 2-O-methyl modified nucleoside
  modified_base 18: mod_base = OTHER; note = 2-O-methyl modified nucleoside
  modified_base 19: mod_base = OTHER; note = 2-O-methyl modified nucleoside
  modified_base 20: mod_base = OTHER; note = 2-O-methyl modified nucleoside
  modified_base 21: mod_base = OTHER; note = 2-O-methyl modified nucleoside
  modified_base 5: mod_base = OTHER; note = 2-O-methyl modified nucleoside
  modified_base 6: mod_base = OTHER; note = 2-O-methyl modified nucleoside
  modified_base 1^2: mod_base = OTHER; note = phosphorothioate linkage
  modified_base 2^3: mod_base = OTHER; note = phosphorothioate linkage
  modified_base 19^20: mod_base = OTHER; note = phosphorothioate linkage
  modified_base 20^21: mod_base = OTHER; note = phosphorothioate linkage
tgacaagtttttcacatcatt

SEQ ID NO: 3671 - RNA, 21 nt, synthetic construct
  source 1..21: mol_type = other RNA
  modified_base 1: mod_base = OTHER; note = 2-O-methyl modified nucleoside; note = GalNAc
  modified_base 9: mod_base = OTHER; note = 2-fluoro-modified nucleoside
  modified_base 11: mod_base = OTHER; note = 2-fluoro-modified nucleoside
  modified_base 13: mod_base = OTHER; note = 2-fluoro-modified nucleoside
  modified_base 2: mod_base = OTHER; note = 2-O-methyl modified nucleoside
  modified_base 3: mod_base = OTHER; note = 2-O-methyl modified nucleoside
  modified_base 4: mod_base = OTHER; note = 2-O-methyl modified nucleoside
  modified_base 5: mod_base = OTHER; note = 2-O-methyl modified nucleoside
  modified_base 6: mod_base = OTHER; note = 2-O-methyl modified nucleoside
  modified_base 8: mod_base = OTHER; note = 2-O-methyl modified nucleoside
  modified_base 10: mod_base = OTHER; note = 2-O-methyl modified nucleoside
  modified_base 12: mod_base = OTHER; note = 2-O-methyl modified nucleoside
  modified_base 14: mod_base = OTHER; note = 2-O-methyl modified nucleoside
  modified_base 15: mod_base = OTHER; note = 2-O-methyl modified nucleoside
  modified_base 16: mod_base = OTHER; note = 2-O-methyl modified nucleoside
  modified_base 17: mod_base = OTHER; note = 2-O-methyl modified nucleoside
  modified_base 18: mod_base = OTHER; note = 2-O-methyl modified nucleoside
  modified_base 19: mod_base = OTHER; note = 2-O-methyl modified nucleoside
  modified_base 20: mod_base = OTHER; note = 2-O-methyl modified nucleoside
  modified_base 21: mod_base = OTHER; note = 2-O-methyl modified nucleoside
  modified_base 1^2: mod_base = OTHER; note = phosphorothioate linkage
  modified_base 2^3: mod_base = OTHER; note = phosphorothioate linkage
  modified_base 19^20: mod_base = OTHER; note = phosphorothioate linkage
  modified_base 20^21: mod_base = OTHER; note = phosphorothioate linkage
tgacaagtttttcacatcatt

SEQ ID NO: 3672 - RNA, 21 nt, synthetic construct
  source 1..21: mol_type = other RNA
  modified_base 1: mod_base = OTHER; note = 2-O-methyl modified nucleoside; note = GalNAc
  modified_base 8: mod_base = OTHER; note = 2-fluoro-modified nucleoside
  modified_base 9: mod_base = OTHER; note = 2-fluoro-modified nucleoside
  modified_base 10: mod_base = OTHER; note = 2-fluoro-modified nucleoside
  modified_base 11: mod_base = OTHER; note = 2-fluoro-modified nucleoside
  modified_base 2: mod_base = OTHER; note = 2-O-methyl modified nucleoside
  modified_base 3: mod_base = OTHER; note = 2-O-methyl modified nucleoside
  modified_base 4: mod_base = OTHER; note = 2-O-methyl modified nucleoside
  modified_base 5: mod_base = OTHER; note = 2-O-methyl modified nucleoside
  modified_base 6: mod_base = OTHER; note = 2-O-methyl modified nucleoside
  modified_base 7: mod_base = OTHER; note = 2-O-methyl modified nucleoside
  modified_base 12: mod_base = OTHER; note = 2-O-methyl modified nucleoside
  modified_base 13: mod_base = OTHER; note = 2-O-methyl modified nucleoside
  modified_base 14: mod_base = OTHER; note = 2-O-methyl modified nucleoside
  modified_base 15: mod_base = OTHER; note = 2-O-methyl modified nucleoside
  modified_base 16: mod_base = OTHER; note = 2-O-methyl modified nucleoside
  modified_base 17: mod_base = OTHER; note = 2-O-methyl modified nucleoside
  modified_base 18: mod_base = OTHER; note = 2-O-methyl modified nucleoside
  modified_base 19: mod_base = OTHER; note = 2-O-methyl modified nucleoside
  modified_base 20: mod_base = OTHER; note = 2-O-methyl modified nucleoside
  modified_base 21: mod_base = OTHER; note = 2-O-methyl modified nucleoside
  modified_base 1^2: mod_base = OTHER; note = phosphorothioate linkage
  modified_base 2^3: mod_base = OTHER; note = phosphorothioate linkage
  modified_base 19^20: mod_base = OTHER; note = phosphorothioate linkage
  modified_base 20^21: mod_base = OTHER; note = phosphorothioate linkage
tgacaagtttttcacatcatt

SEQ ID NO: 3673 - RNA, 21 nt, synthetic construct
  source 1..21: mol_type = other RNA
  modified_base 1: mod_base = OTHER; note = GalNAc; note = 2-O-methyl modified nucleoside
  modified_base 8: mod_base = OTHER; note = 2-fluoro-modified nucleoside
  modified_base 9: mod_base = OTHER; note = 2-fluoro-modified nucleoside
  modified_base 10: mod_base = OTHER; note = 2-fluoro-modified nucleoside
  modified_base 11: mod_base = OTHER; note = 2-fluoro-modified nucleoside
  modified_base 2: mod_base = OTHER; note = 2-O-methyl modified nucleoside
  modified_base 3: mod_base = OTHER; note = 2-O-methyl modified nucleoside
  modified_base 4: mod_base = OTHER; note = 2-O-methyl modified nucleoside
  modified_base 5: mod_base = OTHER; note = 2-O-methyl modified nucleoside
  modified_base 6: mod_base = OTHER; note = 2-O-methyl modified nucleoside
  modified_base 7: mod_base = OTHER; note = 2-O-methyl modified nucleoside
  modified_base 12: mod_base = OTHER; note = 2-O-methyl modified nucleoside
  modified_base 13: mod_base = OTHER; note = 2-O-methyl modified nucleoside
  modified_base 14: mod_base = OTHER; note = 2-O-methyl modified nucleoside
  modified_base 15: mod_base = OTHER; note = 2-O-methyl modified nucleoside
  modified_base 16: mod_base = OTHER; note = 2-O-methyl modified nucleoside
  modified_base 17: mod_base = OTHER; note = 2-O-methyl modified nucleoside
  modified_base 18: mod_base = OTHER; note = 2-O-methyl modified nucleoside
  modified_base 19: mod_base = OTHER; note = 2-O-methyl modified nucleoside
  modified_base 20: mod_base = OTHER; note = 2-O-methyl modified nucleoside
  modified_base 21: mod_base = OTHER; note = 2-O-methyl modified nucleoside
  modified_base 1^2: mod_base = OTHER; note = phosphorothioate linkage
  modified_base 2^3: mod_base = OTHER; note = phosphorothioate linkage
  modified_base 19^20: mod_base = OTHER; note = phosphorothioate linkage
  modified_base 20^21: mod_base = OTHER; note = phosphorothioate linkage
tgacaagtttttcacatcatt

SEQ ID NO: 3674 - RNA, 21 nt, synthetic construct
  source 1..21: mol_type = other RNA
  modified_base 1: mod_base = OTHER; note = 2-O-methyl modified nucleoside; note = GalNAc
  modified_base 8: mod_base = OTHER; note = 2-fluoro-modified nucleoside
  modified_base 9: mod_base = OTHER; note = 2-fluoro-modified nucleoside
  modified_base 10: mod_base = OTHER; note = 2-fluoro-modified nucleoside
  modified_base 11: mod_base = OTHER; note = 2-fluoro-modified nucleoside
  modified_base 2: mod_base = OTHER; note = 2-O-methyl modified nucleoside
  modified_base 3: mod_base = OTHER; note = 2-O-methyl modified nucleoside
  modified_base 4: mod_base = OTHER; note = 2-O-methyl modified nucleoside
  modified_base 5: mod_base = OTHER; note = 2-O-methyl modified nucleoside
  modified_base 6: mod_base = OTHER; note = 2-O-methyl modified nucleoside
  modified_base 7: mod_base = OTHER; note = 2-O-methyl modified nucleoside
  modified_base 12: mod_base = OTHER; note = 2-O-methyl modified nucleoside
  modified_base 13: mod_base = OTHER; note = 2-O-methyl modified nucleoside
  modified_base 14: mod_base = OTHER; note = 2-O-methyl modified nucleoside
  modified_base 15: mod_base = OTHER; note = 2-O-methyl modified nucleoside
  modified_base 16: mod_base = OTHER; note = 2-O-methyl modified nucleoside
  modified_base 17: mod_base = OTHER; note = 2-O-methyl modified nucleoside
  modified_base 18: mod_base = OTHER; note = 2-O-methyl modified nucleoside
  modified_base 19: mod_base = OTHER; note = 2-O-methyl modified nucleoside
  modified_base 20: mod_base = OTHER; note = 2-O-methyl modified nucleoside
  modified_base 21: mod_base = OTHER; note = 2-O-methyl modified nucleoside
  modified_base 1^2: mod_base = OTHER; note = phosphorothioate linkage
  modified_base 2^3: mod_base = OTHER; note = phosphorothioate linkage
  modified_base 19^20: mod_base = OTHER; note = phosphorothioate linkage
  modified_base 20^21: mod_base = OTHER; note = phosphorothioate linkage
tgacaagtttttcacatcatt

SEQ ID NO: 3675 - RNA, 21 nt, synthetic construct
  source 1..21: mol_type = other RNA
  modified_base 1: mod_base = OTHER; note = GalNAc; note = 2-O-methyl modified nucleoside
  modified_base 8: mod_base = OTHER; note = 2-fluoro-modified nucleoside
  modified_base 9: mod_base = OTHER; note = 2-fluoro-modified nucleoside
  modified_base 10: mod_base = OTHER; note = 2-fluoro-modified nucleoside
  modified_base 11: mod_base = OTHER; note = 2-fluoro-modified nucleoside
  modified_base 2: mod_base = OTHER; note = 2-O-methyl modified nucleoside
  modified_base 4: mod_base = OTHER; note = 2-O-methyl modified nucleoside
  modified_base 6: mod_base = OTHER; note = 2-O-methyl modified nucleoside
  modified_base 3: mod_base = OTHER; note = 2-O-methyl modified nucleoside
  modified_base 5: mod_base = OTHER; note = 2-O-methyl modified nucleoside
  modified_base 7: mod_base = OTHER; note = 2-O-methyl modified nucleoside
  modified_base 12: mod_base = OTHER; note = 2-O-methyl modified nucleoside
  modified_base 13: mod_base = OTHER; note = 2-O-methyl modified nucleoside
  modified_base 14: mod_base = OTHER; note = 2-O-methyl modified nucleoside
  modified_base 15: mod_base = OTHER; note = 2-O-methyl modified nucleoside
  modified_base 16: mod_base = OTHER; note = 2-O-methyl modified nucleoside
  modified_base 17: mod_base = OTHER; note = 2-O-methyl modified nucleoside
  modified_base 18: mod_base = OTHER; note = 2-O-methyl modified nucleoside
  modified_base 19: mod_base = OTHER; note = 2-O-methyl modified nucleoside
  modified_base 20: mod_base = OTHER; note = 2-O-methyl modified nucleoside
  modified_base 21: mod_base = OTHER; note = 2-O-methyl modified nucleoside
  modified_base 1^2: mod_base = OTHER; note = phosphorothioate linkage
  modified_base 2^3: mod_base = OTHER; note = phosphorothioate linkage
  modified_base 19^20: mod_base = OTHER; note = phosphorothioate linkage
  modified_base 20^21: mod_base = OTHER; note = phosphorothioate linkage
tgacaagtttttcacatcatt

SEQ ID NO: 3676 - RNA, 21 nt, synthetic construct
  source 1..21: mol_type = other RNA
  modified_base 1: mod_base = OTHER; note = 2-O-methyl modified nucleoside; note = GalNAc
  modified_base 8: mod_base = OTHER; note = 2-fluoro-modified nucleoside
  modified_base 9: mod_base = OTHER; note = 2-fluoro-modified nucleoside
  modified_base 10: mod_base = OTHER; note = 2-fluoro-modified nucleoside
  modified_base 11: mod_base = OTHER; note = 2-fluoro-modified nucleoside
  modified_base 2: mod_base = OTHER; note = 2-O-methyl modified nucleoside
  modified_base 3: mod_base = OTHER; note = 2-O-methyl modified nucleoside
  modified_base 4: mod_base = OTHER; note = 2-O-methyl modified nucleoside
  modified_base 5: mod_base = OTHER; note = 2-O-methyl modified nucleoside
  modified_base 6: mod_base = OTHER; note = 2-O-methyl modified nucleoside
  modified_base 7: mod_base = OTHER; note = 2-O-methyl modified nucleoside
  modified_base 12: mod_base = OTHER; note = 2-O-methyl modified nucleoside
  modified_base 13: mod_base = OTHER; note = 2-O-methyl modified nucleoside
  modified_base 14: mod_base = OTHER; note = 2-O-methyl modified nucleoside
  modified_base 15: mod_base = OTHER; note = 2-O-methyl modified nucleoside
  modified_base 16: mod_base = OTHER; note = 2-O-methyl modified nucleoside
  modified_base 17: mod_base = OTHER; note = 2-O-methyl modified nucleoside
  modified_base 18: mod_base = OTHER; note = 2-O-methyl modified nucleoside
  modified_base 19: mod_base = OTHER; note = 2-O-methyl modified nucleoside
  modified_base 20: mod_base = OTHER; note = 2-O-methyl modified nucleoside
  modified_base 21: mod_base = OTHER; note = 2-O-methyl modified nucleoside
  modified_base 1^2: mod_base = OTHER; note = phosphorothioate linkage
  modified_base 2^3: mod_base = OTHER; note = phosphorothioate linkage
  modified_base 19^20: mod_base = OTHER; note = phosphorothioate linkage
  modified_base 20^21: mod_base = OTHER; note = phosphorothioate linkage
tgacaagtttttcacatcatt

SEQ ID NO: 3677 - RNA, 21 nt, synthetic construct
  source 1..21: mol_type = other RNA
  modified_base 1: mod_base = OTHER; note = 2' O-methyl nucleoside with phosphorothioate linkage
  modified_base 2: mod_base = OTHER; note = 2' fluoro-modified nucleoside with phosphorothioate linkage
  modified_base 3: mod_base = OTHER; note = 2' O-methyl nucleoside
  modified_base 4: mod_base = OTHER; note = 2' fluoro-modified nucleoside
  modified_base 5: mod_base = OTHER; note = 2' O-methyl nucleoside
  modified_base 6: mod_base = OTHER; note = 2' fluoro-modified nucleoside
  modified_base 7: mod_base = OTHER; note = 2' O-methyl nucleoside
  modified_base 8: mod_base = OTHER; note = 2' fluoro-modified nucleoside
  modified_base 9: mod_base = OTHER; note = 2' O-methyl nucleoside
  modified_base 10: mod_base = OTHER; note = 2' fluoro-modified nucleoside
  modified_base 11: mod_base = OTHER; note = 2' O-methyl nucleoside
  modified_base 12: mod_base = OTHER; note = 2' fluoro-modified nucleoside
  modified_base 13: mod_base = OTHER; note = 2' O-methyl nucleoside
  modified_base 14: mod_base = OTHER; note = 2' fluoro-modified nucleoside
  modified_base 15: mod_base = OTHER; note = 2' O-methyl nucleoside
  modified_base 16: mod_base = OTHER; note = 2' fluoro-modified nucleoside
  modified_base 17: mod_base = OTHER; note = 2' O-methyl nucleoside
  modified_base 18: mod_base = OTHER; note = 2' fluoro-modified nucleoside
  modified_base 19: mod_base = OTHER; note = 2' O-methyl nucleoside with phosphorothioate linkage
  modified_base 20: mod_base = OTHER; note = 2' O-methyl nucleoside with phosphorothioate linkage
  modified_base 21: mod_base = OTHER; note = 2' O-methyl nucleoside
tactaccgaatctttcatctt

SEQ ID NO: 3678 - RNA, 21 nt, synthetic construct
  source 1..21: mol_type = other RNA
  modified_base 1: mod_base = OTHER; note = 2' O-methyl nucleoside with phosphorothioate linkage
  modified_base 2: mod_base = OTHER; note = 2' fluoro-modified nucleoside with phosphorothioate linkage
  modified_base 3: mod_base = OTHER; note = 2' O-methyl nucleoside
  modified_base 4: mod_base = OTHER; note = 2' fluoro-modified nucleoside
  modified_base 5: mod_base = OTHER; note = 2' O-methyl nucleoside
  modified_base 6: mod_base = OTHER; note = 2' fluoro-modified nucleoside
  modified_base 7: mod_base = OTHER; note = 2' O-methyl nucleoside
  modified_base 8: mod_base = OTHER; note = 2' fluoro-modified nucleoside
  modified_base 9: mod_base = OTHER; note = 2' O-methyl nucleoside
  modified_base 10: mod_base = OTHER; note = 2' fluoro-modified nucleoside
  modified_base 11: mod_base = OTHER; note = 2' O-methyl nucleoside
  modified_base 12: mod_base = OTHER; note = 2' fluoro-modified nucleoside
  modified_base 13: mod_base = OTHER; note = 2' O-methyl nucleoside
  modified_base 14: mod_base = OTHER; note = 2' fluoro-modified nucleoside
  modified_base 15: mod_base = OTHER; note = 2' O-methyl nucleoside
  modified_base 16: mod_base = OTHER; note = 2' fluoro-modified nucleoside
  modified_base 17: mod_base = OTHER; note = 2' O-methyl nucleoside
  modified_base 18: mod_base = OTHER; note = 2' fluoro-modified nucleoside
  modified_base 19: mod_base = OTHER; note = 2' O-methyl nucleoside with phosphorothioate linkage
  modified_base 20: mod_base = OTHER; note = 2' O-methyl nucleoside with phosphorothioate linkage
  modified_base 21: mod_base = OTHER; note = 2' O-methyl nucleoside
tcttatcaaatgaatcttctt

SEQ ID NO: 3679 - RNA, 21 nt, synthetic construct
  source 1..21: mol_type = other RNA
  modified_base 1: mod_base = OTHER; note = 2' O-methyl nucleoside with phosphorothioate linkage
  modified_base 2: mod_base = OTHER; note = 2' fluoro-modified nucleoside with phosphorothioate linkage
  modified_base 3: mod_base = OTHER; note = 2' O-methyl nucleoside
  modified_base 4: mod_base = OTHER; note = 2' fluoro-modified nucleoside
  modified_base 5: mod_base = OTHER; note = 2' O-methyl nucleoside
  modified_base 6: mod_base = OTHER; note = 2' fluoro-modified nucleoside
  modified_base 7: mod_base = OTHER; note = 2' O-methyl nucleoside
  modified_base 8: mod_base = OTHER; note = 2' fluoro-modified nucleoside
  modified_base 9: mod_base = OTHER; note = 2' O-methyl nucleoside
  modified_base 10: mod_base = OTHER; note = 2' fluoro-modified nucleoside
  modified_base 11: mod_base = OTHER; note = 2' O-methyl nucleoside
  modified_base 12: mod_base = OTHER; note = 2' fluoro-modified nucleoside
  modified_base 13: mod_base = OTHER; note = 2' O-methyl nucleoside
  modified_base 14: mod_base = OTHER; note = 2' fluoro-modified nucleoside
  modified_base 15: mod_base = OTHER; note = 2' O-methyl nucleoside
  modified_base 16: mod_base = OTHER; note = 2' fluoro-modified nucleoside
  modified_base 17: mod_base = OTHER; note = 2' O-methyl nucleoside
  modified_base 18: mod_base = OTHER; note = 2' fluoro-modified nucleoside
  modified_base 19: mod_base = OTHER; note = 2' O-methyl nucleoside with phosphorothioate linkage
  modified_base 20: mod_base = OTHER; note = 2' O-methyl nucleoside with phosphorothioate linkage
  modified_base 21: mod_base = OTHER; note = 2' O-methyl nucleoside
tactaccgaatctttcatctt

SEQ ID NO: 3680 - RNA, 21 nt, synthetic construct
  source 1..21: mol_type = other RNA
  modified_base 1: mod_base = OTHER; note = 2' O-methyl nucleoside with phosphorothioate linkage
  modified_base 2: mod_base = OTHER; note = 2' fluoro-modified nucleoside with phosphorothioate linkage
  modified_base 3: mod_base = OTHER; note = 2' O-methyl nucleoside
  modified_base 4: mod_base = OTHER; note = 2' fluoro-modified nucleoside
  modified_base 5: mod_base = OTHER; note = 2' O-methyl nucleoside
  modified_base 6: mod_base = OTHER; note = 2' fluoro-modified nucleoside
  modified_base 7: mod_base = OTHER; note = 2' O-methyl nucleoside
  modified_base 8: mod_base = OTHER; note = 2' fluoro-modified nucleoside
  modified_base 9: mod_base = OTHER; note = 2' O-methyl nucleoside
  modified_base 10: mod_base = OTHER; note = 2' fluoro-modified nucleoside
  modified_base 11: mod_base = OTHER; note = 2' O-methyl nucleoside
  modified_base 12: mod_base = OTHER; note = 2' fluoro-modified nucleoside
  modified_base 13: mod_base = OTHER; note = 2' O-methyl nucleoside
  modified_base 14: mod_base = OTHER; note = 2' fluoro-modified nucleoside
  modified_base 15: mod_base = OTHER; note = 2' O-methyl nucleoside
  modified_base 16: mod_base = OTHER; note = 2' fluoro-modified nucleoside
  modified_base 17: mod_base = OTHER; note = 2' O-methyl nucleoside
  modified_base 18: mod_base = OTHER; note = 2' fluoro-modified nucleoside
  modified_base 19: mod_base = OTHER; note = 2' O-methyl nucleoside with phosphorothioate linkage
  modified_base 20: mod_base = OTHER; note = 2' O-methyl nucleoside with phosphorothioate linkage
  modified_base 21: mod_base = OTHER; note = 2' O-methyl nucleoside
tgatgtgaaaaacttgtcatt

SEQ ID NO: 3681 - RNA, 21 nt, synthetic construct
  source 1..21: mol_type = other RNA
  modified_base 1: mod_base = OTHER; note = 2' O-methyl nucleoside with phosphorothioate linkage
  modified_base 2: mod_base = OTHER; note = 2' fluoro-modified nucleoside with phosphorothioate linkage
  modified_base 3: mod_base = OTHER; note = 2' O-methyl nucleoside
  modified_base 4: mod_base = OTHER; note = 2' fluoro-modified nucleoside
  modified_base 5: mod_base = OTHER; note = 2' O-methyl nucleoside
  modified_base 6: mod_base = OTHER; note = 2' O-methyl nucleoside
  modified_base 7: mod_base = OTHER; note = 2' fluoro-modified nucleoside
  modified_base 8: mod_base = OTHER; note = 2' O-methyl nucleoside
  modified_base 9: mod_base = OTHER; note = 2' O-methyl nucleoside
  modified_base 10: mod_base = OTHER; note = 2' O-methyl nucleoside
  modified_base 11: mod_base = OTHER; note = 2' O-methyl nucleoside
  modified_base 12: mod_base = OTHER; note = 2' fluoro-modified nucleoside
  modified_base 13: mod_base = OTHER; note = 2' O-methyl nucleoside
  modified_base 14: mod_base = OTHER; note = 2' fluoro-modified nucleoside
  modified_base 15: mod_base = OTHER; note = 2' O-methyl nucleoside
  modified_base 16: mod_base = OTHER; note = 2' fluoro-modified nucleoside
  modified_base 17: mod_base = OTHER; note = 2' O-methyl nucleoside
  modified_base 18: mod_base = OTHER; note = 2' fluoro-modified nucleoside
  modified_base 19: mod_base = OTHER; note = 2' O-methyl nucleoside with phosphorothioate linkage
  modified_base 20: mod_base = OTHER; note = 2' O-methyl nucleoside with phosphorothioate linkage
  modified_base 21: mod_base = OTHER; note = 2' O-methyl nucleoside
tgatgtgaaaaacttgtcatt

SEQ ID NO: 3682 - RNA, 21 nt, synthetic construct
  source 1..21: mol_type = other RNA
  modified_base 1: mod_base = OTHER; note = 2' O-methyl nucleoside with phosphorothioate linkage
  modified_base 2: mod_base = OTHER; note = 2' fluoro-modified nucleoside with phosphorothioate linkage
  modified_base 3: mod_base = OTHER; note = 2' O-methyl nucleoside
  modified_base 4: mod_base = OTHER; note = 2' fluoro-modified nucleoside
  modified_base 5: mod_base = OTHER; note = 2' O-methyl nucleoside
  modified_base 6: mod_base = OTHER; note = 2' fluoro-modified nucleoside
  modified_base 7: mod_base = OTHER; note = 2' O-methyl nucleoside
  modified_base 8: mod_base = OTHER; note = 2' fluoro-modified nucleoside
  modified_base 9: mod_base = OTHER; note = 2' O-methyl nucleoside
  modified_base 10: mod_base = OTHER; note = 2' fluoro-modified nucleoside
  modified_base 11: mod_base = OTHER; note = 2' O-methyl nucleoside
  modified_base 12: mod_base = OTHER; note = 2' fluoro-modified nucleoside
  modified_base 13: mod_base = OTHER; note = 2' O-methyl nucleoside
  modified_base 14: mod_base = OTHER; note = 2' fluoro-modified nucleoside
  modified_base 15: mod_base = OTHER; note = 2' O-methyl nucleoside
  modified_base 16: mod_base = OTHER; note = 2' fluoro-modified nucleoside
  modified_base 17: mod_base = OTHER; note = 2' O-methyl nucleoside
  modified_base 18: mod_base = OTHER; note = 2' fluoro-modified nucleoside
  modified_base 19: mod_base = OTHER; note = 2' O-methyl nucleoside with phosphorothioate linkage
  modified_base 20: mod_base = OTHER; note = 2' O-methyl nucleoside with phosphorothioate linkage
  modified_base 21: mod_base = OTHER; note = 2' O-methyl nucleoside
tcttatcaaatgaatcttctt

SEQ ID NO: 3683 - RNA, 21 nt, synthetic construct
  source 1..21: mol_type = other RNA
  modified_base 1: mod_base = OTHER; note = 2' O-methyl nucleoside with phosphorothioate linkage
  modified_base 2: mod_base = OTHER; note = 2' fluoro-modified nucleoside with phosphorothioate linkage
  modified_base 3: mod_base = OTHER; note = 2' O-methyl nucleoside
  modified_base 4: mod_base = OTHER; note = 2' fluoro-modified nucleoside
  modified_base 5: mod_base = OTHER; note = 2' O-methyl nucleoside
  modified_base 6: mod_base = OTHER; note = 2' fluoro-modified nucleoside
  modified_base 7: mod_base = OTHER; note = 2' O-methyl nucleoside
  modified_base 8: mod_base = OTHER; note = 2' fluoro-modified nucleoside
  modified_base 9: mod_base = OTHER; note = 2' O-methyl nucleoside
  modified_base 10: mod_base = OTHER; note = 2' fluoro-modified nucleoside
  modified_base 11: mod_base = OTHER; note = 2' O-methyl nucleoside
  modified_base 12: mod_base = OTHER; note = 2' fluoro-modified nucleoside
  modified_base 13: mod_base = OTHER; note = 2' O-methyl nucleoside
  modified_base 14: mod_base = OTHER; note = 2' fluoro-modified nucleoside
  modified_base 15: mod_base = OTHER; note = 2' O-methyl nucleoside
  modified_base 16: mod_base = OTHER; note = 2' fluoro-modified nucleoside
  modified_base 17: mod_base = OTHER; note = 2' O-methyl nucleoside
  modified_base 18: mod_base = OTHER; note = 2' fluoro-modified nucleoside
  modified_base 19: mod_base = OTHER; note = 2' O-methyl nucleoside with phosphorothioate linkage
  modified_base 20: mod_base = OTHER; note = 2' O-methyl nucleoside with phosphorothioate linkage
  modified_base 21: mod_base = OTHER; note = 2' O-methyl nucleoside
tgtaataaactccattgagtt

SEQ ID NO: 3684 - RNA, 21 nt, synthetic construct
  source 1..21: mol_type = other RNA
  modified_base 1: mod_base = OTHER; note = 2' O-methyl nucleoside with phosphorothioate linkage
  modified_base 2: mod_base = OTHER; note = 2' fluoro-modified nucleoside with phosphorothioate linkage
  modified_base 3: mod_base = OTHER; note = 2' O-methyl nucleoside
  modified_base 4: mod_base = OTHER; note = 2' fluoro-modified nucleoside
  modified_base 5: mod_base = OTHER; note = 2' O-methyl nucleoside
  modified_base 6: mod_base = OTHER; note = 2' fluoro-modified nucleoside
  modified_base 7: mod_base = OTHER; note = 2' O-methyl nucleoside
  modified_base 8: mod_base = OTHER; note = 2' fluoro-modified nucleoside
  modified_base 9: mod_base = OTHER; note = 2' O-methyl nucleoside
  modified_base 10: mod_base = OTHER; note = 2' fluoro-modified nucleoside
  modified_base 11: mod_base = OTHER; note = 2' O-methyl nucleoside
  modified_base 12: mod_base = OTHER; note = 2' fluoro-modified nucleoside
  modified_base 13: mod_base = OTHER; note = 2' O-methyl nucleoside
  modified_base 14: mod_base = OTHER; note = 2' fluoro-modified nucleoside
  modified_base 15: mod_base = OTHER; note = 2' O-methyl nucleoside
  modified_base 16: mod_base = OTHER; note = 2' fluoro-modified nucleoside
  modified_base 17: mod_base = OTHER; note = 2' O-methyl nucleoside
  modified_base 18: mod_base = OTHER; note = 2' fluoro-modified nucleoside
  modified_base 19: mod_base = OTHER; note = 2' O-methyl nucleoside with phosphorothioate linkage
  modified_base 20: mod_base = OTHER; note = 2' O-methyl nucleoside with phosphorothioate linkage
  modified_base 21: mod_base = OTHER; note = 2' O-methyl nucleoside
tggtaataaactccattgatt

SEQ ID NO: 3685 - RNA, 21 nt, synthetic construct
  source 1..21: mol_type = other RNA
  modified_base 1: mod_base = OTHER; note = 2' O-methyl nucleoside with phosphorothioate linkage
  modified_base 2: mod_base = OTHER; note = 2' fluoro-modified nucleoside with phosphorothioate linkage
  modified_base 3: mod_base = OTHER; note = 2' O-methyl nucleoside
  modified_base 4: mod_base = OTHER; note = 2' fluoro-modified nucleoside
  modified_base 5: mod_base = OTHER; note = 2' O-methyl nucleoside
  modified_base 6: mod_base = OTHER; note = 2' fluoro-modified nucleoside
  modified_base 7: mod_base = OTHER; note = 2' O-methyl nucleoside
  modified_base 8: mod_base = OTHER; note = 2' fluoro-modified nucleoside
  modified_base 9: mod_base = OTHER; note = 2' O-methyl nucleoside
  modified_base 10: mod_base = OTHER; note = 2' fluoro-modified nucleoside
  modified_base 11: mod_base = OTHER; note = 2' O-methyl nucleoside
  modified_base 12: mod_base = OTHER; note = 2' fluoro-modified nucleoside
  modified_base 13: mod_base = OTHER; note = 2' O-methyl nucleoside
  modified_base 14: mod_base = OTHER; note = 2' fluoro-modified nucleoside
  modified_base 15: mod_base = OTHER; note = 2' O-methyl nucleoside
  modified_base 16: mod_base = OTHER; note = 2' fluoro-modified nucleoside
  modified_base 17: mod_base = OTHER; note = 2' O-methyl nucleoside
  modified_base 18: mod_base = OTHER; note = 2' fluoro-modified nucleoside
  modified_base 19: mod_base = OTHER; note = 2' O-methyl nucleoside with phosphorothioate linkage
  modified_base 20: mod_base = OTHER; note = 2' O-methyl nucleoside with phosphorothioate linkage
  modified_base 21: mod_base = OTHER; note = 2' O-methyl nucleoside
tactaccgaatctttcatctt

SEQ ID NO: 3686 - RNA, 21 nt, synthetic construct
  source 1..21: mol_type = other RNA
  modified_base 1: mod_base = OTHER; note = 2' O-methyl nucleoside with phosphorothioate linkage
  modified_base 2: mod_base = OTHER; note = 2' fluoro-modified nucleoside with phosphorothioate linkage
  modified_base 3: mod_base = OTHER; note = 2' O-methyl nucleoside
  modified_base 4: mod_base = OTHER; note = 2' fluoro-modified nucleoside
  modified_base 5: mod_base = OTHER; note = 2' O-methyl nucleoside
  modified_base 6: mod_base = OTHER; note = 2' fluoro-modified nucleoside
  modified_base 7: mod_base = OTHER; note = 2' O-methyl nucleoside
  modified_base 8: mod_base = OTHER; note = 2' fluoro-modified nucleoside
  modified_base 9: mod_base = OTHER; note = 2' O-methyl nucleoside
  modified_base 10: mod_base = OTHER; note = 2' fluoro-modified nucleoside
  modified_base 11: mod_base = OTHER; note = 2' O-methyl nucleoside
  modified_base 12: mod_base = OTHER; note = 2' fluoro-modified nucleoside
  modified_base 13: mod_base = OTHER; note = 2' O-methyl nucleoside
  modified_base 14: mod_base = OTHER; note = 2' fluoro-modified nucleoside
  modified_base 15: mod_base = OTHER; note = 2' O-methyl nucleoside
  modified_base 16: mod_base = OTHER; note = 2' fluoro-modified nucleoside
  modified_base 17: mod_base = OTHER; note = 2' O-methyl nucleoside
  modified_base 18: mod_base = OTHER; note = 2' fluoro-modified nucleoside
  modified_base 19: mod_base = OTHER; note = 2' O-methyl nucleoside with phosphorothioate linkage
  modified_base 20: mod_base = OTHER; note = 2' O-methyl nucleoside with phosphorothioate linkage
  modified_base 21: mod_base = OTHER; note = 2' O-methyl nucleoside
tactaccgaatctttcatctt

SEQ ID NO: 3687 - RNA, 21 nt, synthetic construct
  source 1..21: mol_type = other RNA
  modified_base 1: mod_base = OTHER; note = 2' O-methyl nucleoside with phosphorothioate linkage
  modified_base 2: mod_base = OTHER; note = 2' fluoro-modified nucleoside with phosphorothioate linkage
  modified_base 3: mod_base = OTHER; note = 2' O-methyl nucleoside
  modified_base 4: mod_base = OTHER; note = 2' fluoro-modified nucleoside
  modified_base 5: mod_base = OTHER; note = 2' O-methyl nucleoside
  modified_base 6: mod_base = OTHER; note = 2' fluoro-modified nucleoside
  modified_base 7: mod_base = OTHER; note = 2' O-methyl nucleoside
  modified_base 8: mod_base = OTHER; note = 2' fluoro-modified nucleoside
  modified_base 9: mod_base = OTHER; note = 2' O-methyl nucleoside
  modified_base 10: mod_base = OTHER; note = 2' fluoro-modified nucleoside
  modified_base 11: mod_base = OTHER; note = 2' O-methyl nucleoside
  modified_base 12: mod_base = OTHER; note = 2' fluoro-modified nucleoside
  modified_base 13: mod_base = OTHER; note = 2' O-methyl nucleoside
  modified_base 14: mod_base = OTHER; note = 2' fluoro-modified nucleoside
  modified_base 15: mod_base = OTHER; note = 2' O-methyl nucleoside
  modified_base 16: mod_base = OTHER; note = 2' fluoro-modified nucleoside
  modified_base 17: mod_base = OTHER; note = 2' O-methyl nucleoside
  modified_base 18: mod_base = OTHER; note = 2' fluoro-modified nucleoside
  modified_base 19: mod_base = OTHER; note = 2' O-methyl nucleoside with phosphorothioate linkage
  modified_base 20: mod_base = OTHER; note = 2' O-methyl nucleoside with phosphorothioate linkage
  modified_base 21: mod_base = OTHER; note = 2' O-methyl nucleoside
tcttatcaaatgaatcttctt

SEQ ID NO: 3688 - RNA, 21 nt, synthetic construct
  source 1..21: mol_type = other RNA
  modified_base 1: mod_base = OTHER; note = 2' O-methyl nucleoside with phosphorothioate linkage
  modified_base 2: mod_base = OTHER; note = 2' fluoro-modified nucleoside with phosphorothioate linkage
  modified_base 3: mod_base = OTHER; note = 2' O-methyl nucleoside
  modified_base 4: mod_base = OTHER; note = 2' O-methyl nucleoside
  modified_base 5: mod_base = OTHER; note = 2' O-methyl nucleoside
  modified_base 6: mod_base = OTHER; note = 2' fluoro-modified nucleoside
  modified_base 7: mod_base = OTHER; note = 2' O-methyl nucleoside
  modified_base 8: mod_base = OTHER; note = 2' fluoro-modified nucleoside
  modified_base 9: mod_base = OTHER; note = 2' O-methyl nucleoside
  modified_base 10: mod_base = OTHER; note = 2' fluoro-modified nucleoside
  modified_base 11: mod_base = OTHER; note = 2' O-methyl nucleoside
  modified_base 12: mod_base = OTHER; note = 2' fluoro-modified nucleoside
  modified_base 13: mod_base = OTHER; note = 2' O-methyl nucleoside
  modified_base 14: mod_base = OTHER; note = 2' fluoro-modified nucleoside
  modified_base 15: mod_base = OTHER; note = 2' O-methyl nucleoside
  modified_base 16: mod_base = OTHER; note = 2' fluoro-modified nucleoside
  modified_base 17: mod_base = OTHER; note = 2' O-methyl nucleoside
  modified_base 18: mod_base = OTHER; note = 2' fluoro-modified nucleoside
  modified_base 19: mod_base = OTHER; note = 2' O-methyl nucleoside with phosphorothioate linkage
  modified_base 20: mod_base = OTHER; note = 2' O-methyl nucleoside with phosphorothioate linkage
  modified_base 21: mod_base = OTHER; note = 2' O-methyl nucleoside
tactaccgaatctttcatctt

SEQ ID NO: 3689 - RNA, 21 nt, synthetic construct
  source 1..21: mol_type = other RNA
  modified_base 1: mod_base = OTHER; note = 2' O-methyl nucleoside with phosphorothioate linkage
  modified_base 2: mod_base = OTHER; note = 2' fluoro-modified nucleoside with phosphorothioate linkage
  modified_base 3: mod_base = OTHER; note = 2' O-methyl nucleoside
  modified_base 4: mod_base = OTHER; note = 2' fluoro-modified nucleoside
  modified_base 5: mod_base = OTHER; note = 2' O-methyl nucleoside
  modified_base 6: mod_base = OTHER; note = 2' O-methyl nucleoside
  modified_base 7: mod_base = OTHER; note = 2' O-methyl nucleoside
  modified_base 8: mod_base = OTHER; note = 2' fluoro-modified nucleoside
  modified_base 9: mod_base = OTHER; note = 2' O-methyl nucleoside
  modified_base 10: mod_base = OTHER; note = 2' fluoro-modified nucleoside
  modified_base 11: mod_base = OTHER; note = 2' O-methyl nucleoside
  modified_base 12: mod_base = OTHER; note = 2' fluoro-modified nucleoside
  modified_base 13: mod_base = OTHER; note = 2' O-methyl nucleoside
  modified_base 14: mod_base = OTHER; note = 2' fluoro-modified nucleoside
  modified_base 15: mod_base = OTHER; note = 2' O-methyl nucleoside
  modified_base 16: mod_base = OTHER; note = 2' fluoro-modified nucleoside
  modified_base 17: mod_base = OTHER; note = 2' O-methyl nucleoside
  modified_base 18: mod_base = OTHER; note = 2' fluoro-modified nucleoside
  modified_base 19: mod_base = OTHER; note = 2' O-methyl nucleoside with phosphorothioate linkage
  modified_base 20: mod_base = OTHER; note = 2' O-methyl nucleoside with phosphorothioate linkage
  modified_base 21: mod_base = OTHER; note = 2' O-methyl nucleoside
tactaccgaatctttcatctt

SEQ ID NO: 3690 - RNA, 21 nt, synthetic construct
  source 1..21: mol_type = other RNA
  modified_base 1: mod_base = OTHER; note = 2' O-methyl nucleoside with phosphorothioate linkage
  modified_base 2: mod_base = OTHER; note = 2' fluoro-modified nucleoside with phosphorothioate linkage
  modified_base 3: mod_base = OTHER; note = 2' O-methyl nucleoside
  modified_base 4: mod_base = OTHER; note = 2' fluoro-modified nucleoside
  modified_base 5: mod_base = OTHER; note = 2' O-methyl nucleoside
  modified_base 6: mod_base = OTHER; note = 2' O-methyl nucleoside
  modified_base 7: mod_base = OTHER; note = 2' fluoro-modified nucleoside
  modified_base 8: mod_base = OTHER; note = 2' O-methyl nucleoside
  modified_base 9: mod_base = OTHER; note = 2' O-methyl nucleoside
  modified_base 10: mod_base = OTHER; note = 2' fluoro-modified nucleoside
  modified_base 11: mod_base = OTHER; note = 2' O-methyl nucleoside
  modified_base 12: mod_base = OTHER; note = 2' fluoro-modified nucleoside
  modified_base 13: mod_base = OTHER; note = 2' O-methyl nucleoside
  modified_base 14: mod_base = OTHER; note = 2' fluoro-modified nucleoside
  modified_base 15: mod_base = OTHER; note = 2' O-methyl nucleoside
  modified_base 16: mod_base = OTHER; note = 2' fluoro-modified nucleoside
  modified_base 17: mod_base = OTHER; note = 2' O-methyl nucleoside
  modified_base 18: mod_base = OTHER; note = 2' fluoro-modified nucleoside
  modified_base 19: mod_base = OTHER; note = 2' O-methyl nucleoside with phosphorothioate linkage
  modified_base 20: mod_base = OTHER; note = 2' O-methyl nucleoside with phosphorothioate linkage
  modified_base 21: mod_base = OTHER; note = 2' O-methyl nucleoside
tactaccgaatctttcatctt

SEQ ID NO: 3691 - RNA, 21 nt, synthetic construct
  source 1..21: mol_type = other RNA
  modified_base 1: mod_base = OTHER; note = 2' O-methyl nucleoside with phosphorothioate linkage
  modified_base 2: mod_base = OTHER; note = 2' fluoro-modified nucleoside with phosphorothioate linkage
  modified_base 3: mod_base = OTHER; note = 2' O-methyl nucleoside
  modified_base 4: mod_base = OTHER; note = 2' fluoro-modified nucleoside
  modified_base 5: mod_base = OTHER; note = 2' O-methyl nucleoside
  modified_base 6: mod_base = OTHER; note = 2' fluoro-modified nucleoside
  modified_base 7: mod_base = OTHER; note = 2' O-methyl nucleoside
  modified_base 8: mod_base = OTHER; note = 2' fluoro-modified nucleoside
  modified_base 9: mod_base = OTHER; note = 2' O-methyl nucleoside
  modified_base 10: mod_base = OTHER; note = 2' fluoro-modified nucleoside
  modified_base 11: mod_base = OTHER; note = 2' O-methyl nucleoside
  modified_base 12: mod_base = OTHER; note = 2' fluoro-modified nucleoside
  modified_base 13: mod_base = OTHER; note = 2' O-methyl nucleoside
  modified_base 14: mod_base = OTHER; note = 2' fluoro-modified nucleoside
  modified_base 15: mod_base = OTHER; note = 2' O-methyl nucleoside
  modified_base 16: mod_base = OTHER; note = 2' fluoro-modified nucleoside
  modified_base 17: mod_base = OTHER; note = 2' O-methyl nucleoside
  modified_base 18: mod_base = OTHER; note = 2' fluoro-modified nucleoside
  modified_base 19: mod_base = OTHER; note = 2' O-methyl nucleoside with phosphorothioate linkage
  modified_base 20: mod_base = OTHER; note = 2' O-methyl nucleoside with phosphorothioate linkage
  modified_base 21: mod_base = OTHER; note = 2' O-methyl nucleoside
tgaccaactcatgatgtcttt

SEQ ID NO: 3692 - RNA, 21 nt, synthetic construct
  source 1..21: mol_type = other RNA
  modified_base 1: mod_base = OTHER; note = 2' O-methyl nucleoside with phosphorothioate linkage
  modified_base 2: mod_base = OTHER; note = 2' fluoro-modified nucleoside with phosphorothioate linkage
  modified_base 3: mod_base = OTHER; note = 2' O-methyl nucleoside
  modified_base 4: mod_base = OTHER; note = 2' fluoro-modified nucleoside
  modified_base 5: mod_base = OTHER; note = 2' O-methyl nucleoside
  modified_base 6: mod_base = OTHER; note = 2' fluoro-modified nucleoside
  modified_base 7: mod_base = OTHER; note = 2' O-methyl nucleoside
  modified_base 8: mod_base = OTHER; note = 2' fluoro-modified nucleoside
  modified_base 9: mod_base = OTHER; note = 2' O-methyl nucleoside
  modified_base 10: mod_base = OTHER; note = 2' fluoro-modified nucleoside
  modified_base 11: mod_base = OTHER; note = 2' O-methyl nucleoside
  modified_base 12: mod_base = OTHER; note = 2' fluoro-modified nucleoside
  modified_base 13: mod_base = OTHER; note = 2' O-methyl nucleoside
  modified_base 14: mod_base = OTHER; note = 2' fluoro-modified nucleoside
  modified_base 15: mod_base = OTHER; note = 2' O-methyl nucleoside
  modified_base 16: mod_base = OTHER; note = 2' fluoro-modified nucleoside
  modified_base 17: mod_base = OTHER; note = 2' O-methyl nucleoside
  modified_base 18: mod_base = OTHER; note = 2' fluoro-modified nucleoside
  modified_base 19: mod_base = OTHER; note = 2' O-methyl nucleoside with phosphorothioate linkage
  modified_base 20: mod_base = OTHER; note = 2' O-methyl nucleoside with phosphorothioate linkage
  modified_base 21: mod_base = OTHER; note = 2' O-methyl nucleoside
tgttctgccattccagtcttt

SEQ ID NO: 3693 - RNA, 21 nt, synthetic construct
  source 1..21: mol_type = other RNA
  modified_base 1: mod_base = OTHER; note = 2' O-methyl nucleoside with phosphorothioate linkage
  modified_base 2: mod_base = OTHER; note = 2' fluoro-modified nucleoside with phosphorothioate linkage
  modified_base 3: mod_base = OTHER; note = 2' O-methyl nucleoside
  modified_base 4: mod_base = OTHER; note = 2' fluoro-modified nucleoside
  modified_base 5: mod_base = OTHER; note = 2' O-methyl nucleoside
  modified_base 6: mod_base = OTHER; note = 2' fluoro-modified nucleoside
  modified_base 7: mod_base = OTHER; note = 2' O-methyl nucleoside
  modified_base 8: mod_base = OTHER; note = 2' fluoro-modified nucleoside
  modified_base 9: mod_base = OTHER; note = 2' O-methyl nucleoside
  modified_base 10: mod_base = OTHER; note = 2' fluoro-modified nucleoside
  modified_base 11: mod_base = OTHER; note = 2' O-methyl nucleoside
  modified_base 12: mod_base = OTHER; note = 2' fluoro-modified nucleoside
  modified_base 13: mod_base = OTHER; note = 2' O-methyl nucleoside
  modified_base 14: mod_base = OTHER; note = 2' fluoro-modified nucleoside
  modified_base 15: mod_base = OTHER; note = 2' O-methyl nucleoside
  modified_base 16: mod_base = OTHER; note = 2' fluoro-modified nucleoside
  modified_base 17: mod_base = OTHER; note = 2' O-methyl nucleoside
  modified_base 18: mod_base = OTHER; note = 2' fluoro-modified nucleoside
  modified_base 19: mod_base = OTHER; note = 2' O-methyl nucleoside with phosphorothioate linkage
  modified_base 20: mod_base = OTHER; note = 2' O-methyl nucleoside with phosphorothioate linkage
  modified_base 21: mod_base = OTHER; note = 2' O-methyl nucleoside
tgatgtgaaaaacttgtcatt

SEQ ID NO: 3694 - RNA, 21 nt, synthetic construct
  source 1..21: mol_type = other RNA
  modified_base 1: mod_base = OTHER; note = 2' O-methyl nucleoside with phosphorothioate linkage
  modified_base 2: mod_base = OTHER; note = 2' fluoro-modified nucleoside with phosphorothioate linkage
  modified_base 3: mod_base = OTHER; note = 2' O-methyl nucleoside
  modified_base 4: mod_base = OTHER; note = 2' fluoro-modified nucleoside
  modified_base 5: mod_base = OTHER; note = 2' O-methyl nucleoside
  modified_base 6: mod_base = OTHER; note = 2' fluoro-modified nucleoside
  modified_base 7: mod_base = OTHER; note = 2' O-methyl nucleoside
  modified_base 8: mod_base = OTHER; note = 2' fluoro-modified nucleoside
  modified_base 9: mod_base = OTHER; note = 2' O-methyl nucleoside
  modified_base 10: mod_base = OTHER; note = 2' fluoro-modified nucleoside
  modified_base 11: mod_base = OTHER; note = 2' O-methyl nucleoside
  modified_base 12: mod_base = OTHER; note = 2' fluoro-modified nucleoside
  modified_base 13: mod_base = OTHER; note = 2' O-methyl nucleoside
  modified_base 14: mod_base = OTHER; note = 2' fluoro-modified nucleoside
  modified_base 15: mod_base = OTHER; note = 2' O-methyl nucleoside
  modified_base 16: mod_base = OTHER; note = 2' fluoro-modified nucleoside
  modified_base 17: mod_base = OTHER; note = 2' O-methyl nucleoside
  modified_base 18: mod_base = OTHER; note = 2' fluoro-modified nucleoside
  modified_base 19: mod_base = OTHER; note = 2' O-methyl nucleoside with phosphorothioate linkage
  modified_base 20: mod_base = OTHER; note = 2' O-methyl nucleoside with phosphorothioate linkage
  modified_base 21: mod_base = OTHER; note = 2' O-methyl nucleoside
tggatgtgaaaaacttgtctt

SEQ ID NO: 3695 - RNA, 21 nt, synthetic construct
  source 1..21: mol_type = other RNA
  modified_base 1: mod_base = OTHER; note = 2' O-methyl nucleoside with phosphorothioate linkage
  modified_base 2: mod_base = OTHER; note = 2' fluoro-modified nucleoside with phosphorothioate linkage
  modified_base 3: mod_base = OTHER; note = 2' O-methyl nucleoside
  modified_base 4: mod_base = OTHER; note = 2' fluoro-modified nucleoside
  modified_base 5: mod_base = OTHER; note = 2' O-methyl nucleoside
  modified_base 6: mod_base = OTHER; note = 2' fluoro-modified nucleoside
  modified_base 7: mod_base = OTHER; note = 2' O-methyl nucleoside
  modified_base 8: mod_base = OTHER; note = 2' fluoro-modified nucleoside
  modified_base 9: mod_base = OTHER; note = 2' O-methyl nucleoside
  modified_base 10: mod_base = OTHER; note = 2' fluoro-modified nucleoside
  modified_base 11: mod_base = OTHER; note = 2' O-methyl nucleoside
  modified_base 12: mod_base = OTHER; note = 2' fluoro-modified nucleoside
  modified_base 13: mod_base = OTHER; note = 2' O-methyl nucleoside
  modified_base 14: mod_base = OTHER; note = 2' fluoro-modified nucleoside
  modified_base 15: mod_base = OTHER; note = 2' O-methyl nucleoside
  modified_base 16: mod_base = OTHER; note = 2' fluoro-modified nucleoside
  modified_base 17: mod_base = OTHER; note = 2' O-methyl nucleoside
  modified_base 18: mod_base = OTHER; note = 2' fluoro-modified nucleoside
  modified_base 19: mod_base = OTHER; note = 2' O-methyl nucleoside with phosphorothioate linkage
  modified_base 20: mod_base = OTHER; note = 2' O-methyl nucleoside with phosphorothioate linkage
  modified_base 21: mod_base = OTHER; note = 2' O-methyl nucleoside
tcaccttggtaataaactctt

SEQ ID NO: 3696 - RNA, 21 nt, synthetic construct
  source 1..21: mol_type = other RNA
  modified_base 1: mod_base = OTHER; note = 2' O-methyl nucleoside with phosphorothioate linkage
  modified_base 2: mod_base = OTHER; note = 2' fluoro-modified nucleoside with phosphorothioate linkage
  modified_base 3: mod_base = OTHER; note = 2' O-methyl nucleoside
  modified_base 4: mod_base = OTHER; note = 2' fluoro-modified nucleoside
  modified_base 5: mod_base = OTHER; note = 2' O-methyl nucleoside
  modified_base 6: mod_base = OTHER; note = 2' fluoro-modified nucleoside
  modified_base 7: mod_base = OTHER; note = 2' O-methyl nucleoside
  modified_base 8: mod_base = OTHER; note = 2' fluoro-modified nucleoside
  modified_base 9: mod_base = OTHER; note = 2' O-methyl nucleoside
  modified_base 10: mod_base = OTHER; note = 2' fluoro-modified nucleoside
  modified_base 11: mod_base = OTHER; note = 2' O-methyl nucleoside
  modified_base 12: mod_base = OTHER; note = 2' fluoro-modified nucleoside
  modified_base 13: mod_base = OTHER; note = 2' O-methyl nucleoside
  modified_base 14: mod_base = OTHER; note = 2' fluoro-modified nucleoside
  modified_base 15: mod_base = OTHER; note = 2' O-methyl nucleoside
  modified_base 16: mod_base = OTHER; note = 2' fluoro-modified nucleoside
  modified_base 17: mod_base = OTHER; note = 2' O-methyl nucleoside
  modified_base 18: mod_base = OTHER; note = 2' fluoro-modified nucleoside
  modified_base 19: mod_base = OTHER; note = 2' O-methyl nucleoside with phosphorothioate linkage
  modified_base 20: mod_base = OTHER; note = 2' O-methyl nucleoside with phosphorothioate linkage
  modified_base 21: mod_base = OTHER; note = 2' O-methyl nucleoside
tgtaagtgccaccttggtatt

SEQ ID NO: 3697 - RNA, 21 nt, synthetic construct
  source 1..21: mol_type = other RNA
  modified_base 1: mod_base = OTHER; note = 2' O-methyl nucleoside with phosphorothioate linkage
  modified_base 2: mod_base = OTHER; note = 2' fluoro-modified nucleoside with phosphorothioate linkage
  modified_base 3: mod_base = OTHER; note = 2' O-methyl nucleoside
  modified_base 4: mod_base = OTHER; note = 2' fluoro-modified nucleoside
  modified_base 5: mod_base = OTHER; note = 2' O-methyl nucleoside
  modified_base 6: mod_base = OTHER; note = 2' fluoro-modified nucleoside
  modified_base 7: mod_base = OTHER; note = 2' O-methyl nucleoside
  modified_base 8: mod_base = OTHER; note = 2' fluoro-modified nucleoside
  modified_base 9: mod_base = OTHER; note = 2' O-methyl nucleoside
  modified_base 10: mod_base = OTHER; note = 2' fluoro-modified nucleoside
  modified_base 11: mod_base = OTHER; note = 2' O-methyl nucleoside
  modified_base 12: mod_base = OTHER; note = 2' fluoro-modified nucleoside
  modified_base 13: mod_base = OTHER; note = 2' O-methyl nucleoside
  modified_base 14: mod_base = OTHER; note = 2' fluoro-modified nucleoside
  modified_base 15: mod_base = OTHER; note = 2' O-methyl nucleoside
  modified_base 16: mod_base = OTHER; note = 2' fluoro-modified nucleoside
  modified_base 17: mod_base = OTHER; note = 2' O-methyl nucleoside
  modified_base 18: mod_base = OTHER; note = 2' fluoro-modified nucleoside
  modified_base 19: mod_base = OTHER; note = 2' O-methyl nucleoside with phosphorothioate linkage
  modified_base 20: mod_base = OTHER; note = 2' O-methyl nucleoside with phosphorothioate linkage
  modified_base 21: mod_base = OTHER; note = 2' O-methyl nucleoside
tagtaagtgccaccttggttt

SEQ ID NO: 3698 - RNA, 21 nt, synthetic construct
  source 1..21: mol_type = other RNA
  modified_base 1: mod_base = OTHER; note = 2' O-methyl nucleoside with phosphorothioate linkage
  modified_base 2: mod_base = OTHER; note = 2' fluoro-modified nucleoside with phosphorothioate linkage
  modified_base 3: mod_base = OTHER; note = 2' O-methyl nucleoside
  modified_base 4: mod_base = OTHER; note = 2' fluoro-modified nucleoside
  modified_base 5: mod_base = OTHER; note = 2' O-methyl nucleoside
  modified_base 6: mod_base = OTHER; note = 2' fluoro-modified nucleoside
  modified_base 7: mod_base = OTHER; note = 2' O-methyl nucleoside
  modified_base 8: mod_base = OTHER; note = 2' fluoro-modified nucleoside
  modified_base 9: mod_base = OTHER; note = 2' O-methyl nucleoside
  modified_base 10: mod_base = OTHER; note = 2' fluoro-modified nucleoside
  modified_base 11: mod_base = OTHER; note = 2' O-methyl nucleoside
  modified_base 12: mod_base = OTHER; note = 2' fluoro-modified nucleoside
  modified_base 13: mod_base = OTHER; note = 2' O-methyl nucleoside
  modified_base 14: mod_base = OTHER; note = 2' fluoro-modified nucleoside
  modified_base 15: mod_base = OTHER; note = 2' O-methyl nucleoside
  modified_base 16: mod_base = OTHER; note = 2' fluoro-modified nucleoside
  modified_base 17: mod_base = OTHER; note = 2' O-methyl nucleoside
  modified_base 18: mod_base = OTHER; note = 2' fluoro-modified nucleoside
  modified_base 19: mod_base = OTHER; note = 2' O-methyl nucleoside with phosphorothioate linkage
  modified_base 20: mod_base = OTHER; note = 2' O-methyl nucleoside with phosphorothioate linkage
  modified_base 21: mod_base = OTHER; note = 2' O-methyl nucleoside
tttgagtaagtgccacctttt

SEQ ID NO: 3699 - RNA, 21 nt, synthetic construct
  source 1..21: mol_type = other RNA
  modified_base 1: mod_base = OTHER; note = 2' O-methyl nucleoside with phosphorothioate linkage
  modified_base 2: mod_base = OTHER; note = 2' fluoro-modified nucleoside with phosphorothioate linkage
  modified_base 3: mod_base = OTHER; note = 2' O-methyl nucleoside
  modified_base 4: mod_base = OTHER; note = 2' fluoro-modified nucleoside
  modified_base 5: mod_base = OTHER; note = 2' O-methyl nucleoside
  modified_base 6: mod_base = OTHER; note = 2' fluoro-modified nucleoside
  modified_base 7: mod_base = OTHER; note = 2' O-methyl nucleoside
  modified_base 8: mod_base = OTHER; note = 2' fluoro-modified nucleoside
  modified_base 9: mod_base = OTHER; note = 2' O-methyl nucleoside
  modified_base 10: mod_base = OTHER; note = 2' fluoro-modified nucleoside
  modified_base 11: mod_base = OTHER; note = 2' O-methyl nucleoside
  modified_base 12: mod_base = OTHER; note = 2' fluoro-modified nucleoside
  modified_base 13: mod_base = OTHER; note = 2' O-methyl nucleoside
  modified_base 14: mod_base = OTHER; note = 2' fluoro-modified nucleoside
  modified_base 15: mod_base = OTHER; note = 2' O-methyl nucleoside
  modified_base 16: mod_base = OTHER; note = 2' fluoro-modified nucleoside
  modified_base 17: mod_base = OTHER; note = 2' O-methyl nucleoside
  modified_base 18: mod_base = OTHER; note = 2' fluoro-modified nucleoside
  modified_base 19: mod_base = OTHER; note = 2' O-methyl nucleoside with phosphorothioate linkage
  modified_base 20: mod_base = OTHER; note = 2' O-methyl nucleoside with phosphorothioate linkage
  modified_base 21: mod_base = OTHER; note = 2' O-methyl nucleoside
ttttgagtaagtgccaccttt

SEQ ID NO: 3700 - DNA, 21 bp, synthetic construct
  source 1..21: mol_type = other DNA
  modified_base 1: mod_base = OTHER; note = 2' O-methyl nucleoside with phosphorothioate linkage
  modified_base 2: mod_base = OTHER; note = 2' fluoro-modified nucleoside with phosphorothioate linkage
  modified_base 3: mod_base = OTHER; note = 2' O-methyl nucleoside
  modified_base 5: mod_base = OTHER; note = 2' O-methyl nucleoside
  modified_base 7: mod_base = OTHER; note = 2' O-methyl nucleoside
  modified_base 8: mod_base = OTHER; note = 2' fluoro-modified nucleoside
  modified_base 9: mod_base = OTHER; note = 2' O-methyl nucleoside
  modified_base 10: mod_base = OTHER; note = 2' fluoro-modified nucleoside
  modified_base 11: mod_base = OTHER; note = 2' O-methyl nucleoside
  modified_base 13: mod_base = OTHER; note = 2' O-methyl nucleoside
  modified_base 15: mod_base = OTHER; note = 2' O-methyl nucleoside
  modified_base 17: mod_base = OTHER; note = 2' O-methyl nucleoside
  modified_base 19: mod_base = OTHER; note = 2' O-methyl nucleoside with phosphorothioate linkage
  modified_base 20: mod_base = OTHER; note = 2' O-methyl nucleoside with phosphorothioate linkage
  modified_base 21: mod_base = OTHER; note = 2' O-methyl nucleoside
  misc_feature 1..3: note = RNA
  misc_feature 4: note = DNA
  misc_feature 5: note = RNA
  misc_feature 6: note = DNA
  misc_feature 7..11: note = RNA
  misc_feature 12: note = DNA
  misc_feature 13: note = RNA
  misc_feature 14: note = DNA
  misc_feature 15: note = RNA
  misc_feature 16: note = DNA
  misc_feature 17: note = RNA
  misc_feature 18: note = DNA
  misc_feature 19..21: note = RNA
tactaccgaatctttcatctt

SEQ ID NO: 3701 - DNA, 21 bp, synthetic construct
  source 1..21: mol_type = other DNA
  modified_base 1: mod_base = OTHER; note = 2' O-methyl nucleoside with phosphorothioate linkage
  modified_base 2: mod_base = OTHER; note = 2' fluoro-modified nucleoside with phosphorothioate linkage
  modified_base 3: mod_base = OTHER; note = 2' O-methyl nucleoside
  modified_base 5: mod_base = OTHER; note = 2' O-methyl nucleoside
  modified_base 7: mod_base = OTHER; note = 2' O-methyl nucleoside
  modified_base 8: mod_base = OTHER; note = 2' fluoro-modified nucleoside
  modified_base 9: mod_base = OTHER; note = 2' O-methyl nucleoside
  modified_base 10: mod_base = OTHER; note = 2' fluoro-modified nucleoside
  modified_base 11: mod_base = OTHER; note = 2' O-methyl nucleoside
  modified_base 13: mod_base = OTHER; note = 2' O-methyl nucleoside
  modified_base 14: mod_base = OTHER; note = 2' fluoro-modified nucleoside
  modified_base 15: mod_base = OTHER; note = 2' O-methyl nucleoside
  modified_base 17: mod_base = OTHER; note = 2' O-methyl nucleoside
  modified_base 18: mod_base = OTHER; note = 2' fluoro-modified nucleoside
  modified_base 19: mod_base = OTHER; note = 2' O-methyl nucleoside with phosphorothioate linkage
  modified_base 20: mod_base = OTHER; note = 2' O-methyl nucleoside with phosphorothioate linkage
  modified_base 21: mod_base = OTHER; note = 2' O-methyl nucleoside
  misc_feature 1..3: note = RNA
  misc_feature 4: note = DNA
  misc_feature 5: note = RNA
  misc_feature 6: note = DNA
  misc_feature 7..11: note = RNA
  misc_feature 12: note = DNA
  misc_feature 13..15: note = RNA
  misc_feature 16: note = DNA
  misc_feature 17..21: note = RNA
tactaccgaatctttcatctt

SEQ ID NO: 3702 - skipped

SEQ ID NO: 3703 - RNA, 21 nt, synthetic construct
  source 1..21: mol_type = other RNA
  modified_base 1: mod_base = OTHER; note = 2' O-methyl nucleoside with phosphorothioate linkage
  modified_base 2: mod_base = OTHER; note = 2' fluoro-modified nucleoside with phosphorothioate linkage
  modified_base 3: mod_base = OTHER; note = 2' O-methyl nucleoside
  modified_base 4: mod_base = OTHER; note = 2' O-methyl nucleoside
  modified_base 5: mod_base = OTHER; note = 2' O-methyl nucleoside
  modified_base 6: mod_base = OTHER; note = 2' fluoro-modified nucleoside
  modified_base 7: mod_base = OTHER; note = 2' O-methyl nucleoside
  modified_base 8: mod_base = OTHER; note = 2' O-methyl nucleoside
  modified_base 9: mod_base = OTHER; note = 2' O-methyl nucleoside
  modified_base 10: mod_base = OTHER; note = 2' fluoro-modified nucleoside
  modified_base 11: mod_base = OTHER; note = 2' O-methyl nucleoside
  modified_base 12: mod_base = OTHER; note = 2' fluoro-modified nucleoside
  modified_base 13: mod_base = OTHER; note = 2' O-methyl nucleoside
  modified_base 14: mod_base = OTHER; note = 2' fluoro-modified nucleoside
  modified_base 15: mod_base = OTHER; note = 2' O-methyl nucleoside
  modified_base 16: mod_base = OTHER; note = 2' fluoro-modified nucleoside
  modified_base 17: mod_base = OTHER; note = 2' O-methyl nucleoside
  modified_base 18: mod_base = OTHER; note = 2' fluoro-modified nucleoside
  modified_base 19: mod_base = OTHER; note = 2' O-methyl nucleoside with phosphorothioate linkage
  modified_base 20: mod_base = OTHER; note = 2' O-methyl nucleoside with phosphorothioate linkage
  modified_base 21: mod_base = OTHER; note = 2' O-methyl nucleoside
tactaccgaatctttcatctt

SEQ ID NO: 3704 - DNA, 21 bp, synthetic construct
  source 1..21: mol_type = other DNA
  modified_base 1: mod_base = OTHER; note = Nucleoside with phosphorothioate linkage
  modified_base 2: mod_base = OTHER; note = 2' fluoro-modified nucleoside with phosphorothioate linkage
  modified_base 3: mod_base = OTHER; note = 2' O-methyl nucleoside
  modified_base 4: mod_base = OTHER; note = 2' O-methyl nucleoside
  modified_base 5: mod_base = OTHER; note = 2' O-methyl nucleoside
  modified_base 6: mod_base = OTHER; note = 2' fluoro-modified nucleoside
  modified_base 7: mod_base = OTHER; note = 2' O-methyl nucleoside
  modified_base 8: mod_base = OTHER; note = 2' fluoro-modified nucleoside
  modified_base 9: mod_base = OTHER; note = 2' O-methyl nucleoside
  modified_base 10: mod_base = OTHER; note = 2' fluoro-modified nucleoside
  modified_base 11: mod_base = OTHER; note = 2' O-methyl nucleoside
  modified_base 12: mod_base = OTHER; note = 2' fluoro-modified nucleoside
  modified_base 13: mod_base = OTHER; note = 2' O-methyl nucleoside
  modified_base 14: mod_base = OTHER; note = 2' fluoro-modified nucleoside
  modified_base 15: mod_base = OTHER; note = 2' O-methyl nucleoside
  modified_base 16: mod_base = OTHER; note = 2' fluoro-modified nucleoside
  modified_base 17: mod_base = OTHER; note = 2' O-methyl nucleoside
  modified_base 18: mod_base = OTHER; note = 2' fluoro-modified nucleoside
  modified_base 19: mod_base = OTHER; note = 2' O-methyl nucleoside with phosphorothioate linkage
  modified_base 20: mod_base = OTHER; note = 2' O-methyl nucleoside with phosphorothioate linkage
  modified_base 21: mod_base = OTHER; note = 2' O-methyl nucleoside
  misc_feature 1: note = DNA
  misc_feature 2..21: note = RNA
tactaccgaatctttcatctt

SEQ ID NO: 3705 - RNA, 21 nt, synthetic construct
  source 1..21: mol_type = other RNA
  modified_base 1: mod_base = OTHER; note = 2' fluoro-modified nucleoside with phosphorothioate linkage
  modified_base 2: mod_base = OTHER; note = 2' fluoro-modified nucleoside with phosphorothioate linkage
  modified_base 3: mod_base = OTHER; note = 2' O-methyl nucleoside
  modified_base 4: mod_base = OTHER; note = 2' O-methyl nucleoside
  modified_base 5: mod_base = OTHER; note = 2' O-methyl nucleoside
  modified_base 6: mod_base = OTHER; note = 2' fluoro-modified nucleoside
  modified_base 7: mod_base = OTHER; note = 2' O-methyl nucleoside
  modified_base 8: mod_base = OTHER; note = 2' fluoro-modified nucleoside
  modified_base 9: mod_base = OTHER; note = 2' O-methyl nucleoside
  modified_base 10: mod_base = OTHER; note = 2' fluoro-modified nucleoside
  modified_base 11: mod_base = OTHER; note = 2' O-methyl nucleoside
  modified_base 12: mod_base = OTHER; note = 2' fluoro-modified nucleoside
  modified_base 13: mod_base = OTHER; note = 2' O-methyl nucleoside
  modified_base 14: mod_base = OTHER; note = 2' fluoro-modified nucleoside
  modified_base 15: mod_base = OTHER; note = 2' O-methyl nucleoside
  modified_base 16: mod_base = OTHER; note = 2' fluoro-modified nucleoside
  modified_base 17: mod_base = OTHER; note = 2' O-methyl nucleoside
  modified_base 18: mod_base = OTHER; note = 2' fluoro-modified nucleoside
  modified_base 19: mod_base = OTHER; note = 2' O-methyl nucleoside with phosphorothioate linkage
  modified_base 20: mod_base = OTHER; note = 2' O-methyl nucleoside with phosphorothioate linkage
  modified_base 21: mod_base = OTHER; note = 2' O-methyl nucleoside
tactaccgaatctttcatctt

SEQ ID NO: 3706 - RNA, 21 nt, synthetic construct
  source 1..21: mol_type = other RNA
  modified_base 1: mod_base = OTHER; note = 2' O-methyl nucleoside with phosphorothioate linkage
  modified_base 2: mod_base = OTHER; note = 2' fluoro-modified nucleoside with phosphorothioate linkage
  modified_base 3: mod_base = OTHER; note = 2' O-methyl nucleoside
  modified_base 4: mod_base = OTHER; note = 2' fluoro-modified nucleoside
  modified_base 5: mod_base = OTHER; note = 2' O-methyl nucleoside
  modified_base 6: mod_base = OTHER; note = 2' fluoro-modified nucleoside
  modified_base 7: mod_base = OTHER; note = 2' O-methyl nucleoside
  modified_base 8: mod_base = OTHER; note = 2' fluoro-modified nucleoside
  modified_base 9: mod_base = OTHER; note = 2' O-methyl nucleoside
  modified_base 10: mod_base = OTHER; note = 2' fluoro-modified nucleoside
  modified_base 11: mod_base = OTHER; note = 2' O-methyl nucleoside
  modified_base 12: mod_base = OTHER; note = 2' fluoro-modified nucleoside
  modified_base 13: mod_base = OTHER; note = 2' O-methyl nucleoside
  modified_base 14: mod_base = OTHER; note = 2' fluoro-modified nucleoside
  modified_base 15: mod_base = OTHER; note = 2' O-methyl nucleoside
  modified_base 16: mod_base = OTHER; note = 2' fluoro-modified nucleoside
  modified_base 17: mod_base = OTHER; note = 2' O-methyl nucleoside
  modified_base 18: mod_base = OTHER; note = 2' fluoro-modified nucleoside
  modified_base 19: mod_base = OTHER; note = 2' O-methyl nucleoside with phosphorothioate linkage
  modified_base 20: mod_base = OTHER; note = 2' O-methyl nucleoside with phosphorothioate linkage
  modified_base 21: mod_base = OTHER; note = 2' O-methyl nucleoside
tgatgtgaaaaacttgtcatt

SEQ ID NO: 3707 - RNA, 21 nt, synthetic construct
  source 1..21: mol_type = other RNA
  modified_base 1: mod_base = OTHER; note = 2' O-methyl nucleoside with phosphorothioate linkage
  modified_base 2: mod_base = OTHER; note = 2' fluoro-modified nucleoside with phosphorothioate linkage
  modified_base 3: mod_base = OTHER; note = 2' O-methyl nucleoside
  modified_base 4: mod_base = OTHER; note = 2' fluoro-modified nucleoside
  modified_base 5: mod_base = OTHER; note = 2' O-methyl nucleoside
  modified_base 6: mod_base = OTHER; note = 2' fluoro-modified nucleoside
  modified_base 7: mod_base = OTHER; note = 2' O-methyl nucleoside
  modified_base 8: mod_base = OTHER; note = 2' fluoro-modified nucleoside
  modified_base 9: mod_base = OTHER; note = 2' O-methyl nucleoside
  modified_base 10: mod_base = OTHER; note = 2' fluoro-modified nucleoside
  modified_base 11: mod_base = OTHER; note = 2' O-methyl nucleoside
  modified_base 12: mod_base = OTHER; note = 2' fluoro-modified nucleoside
  modified_base 13: mod_base = OTHER; note = 2' O-methyl nucleoside
  modified_base 14: mod_base = OTHER; note = 2' fluoro-modified nucleoside
  modified_base 15: mod_base = OTHER; note = 2' O-methyl nucleoside
  modified_base 16: mod_base = OTHER; note = 2' fluoro-modified nucleoside
  modified_base 17: mod_base = OTHER; note = 2' O-methyl nucleoside
  modified_base 18: mod_base = OTHER; note = 2' fluoro-modified nucleoside
  modified_base 19: mod_base = OTHER; note = 2' O-methyl nucleoside with phosphorothioate linkage
  modified_base 20: mod_base = OTHER; note = 2' O-methyl nucleoside with phosphorothioate linkage
  modified_base 21: mod_base = OTHER; note = 2' O-methyl nucleoside
tgatgtgaaaaacttgtcatt

SEQ ID NO: 3708 - RNA, 21 nt, synthetic construct
  source 1..21: mol_type = other RNA
  modified_base 1: mod_base = OTHER; note = 2' O-methyl nucleoside with phosphorothioate linkage
  modified_base 2: mod_base = OTHER; note = 2' fluoro-modified nucleoside with phosphorothioate linkage
  modified_base 3: mod_base = OTHER; note = 2' O-methyl nucleoside
  modified_base 4: mod_base = OTHER; note = 2' O-methyl nucleoside
  modified_base 5: mod_base = OTHER; note = 2' O-methyl nucleoside
  modified_base 6: mod_base = OTHER; note = 2' fluoro-modified nucleoside
  modified_base 7: mod_base = OTHER; note = 2' O-methyl nucleoside
  modified_base 8: mod_base = OTHER; note = 2' fluoro-modified nucleoside
  modified_base 9: mod_base = OTHER; note = 2' O-methyl nucleoside
  modified_base 10: mod_base = OTHER; note = 2' fluoro-modified nucleoside
  modified_base 11: mod_base = OTHER; note = 2' O-methyl nucleoside
  modified_base 12: mod_base = OTHER; note = 2' fluoro-modified nucleoside
  modified_base 13: mod_base = OTHER; note = 2' O-methyl nucleoside
  modified_base 14: mod_base = OTHER; note = 2' fluoro-modified nucleoside
  modified_base 15: mod_base = OTHER; note = 2' O-methyl nucleoside
  modified_base 16: mod_base = OTHER; note = 2' fluoro-modified nucleoside
  modified_base 17: mod_base = OTHER; note = 2' O-methyl nucleoside
  modified_base 18: mod_base = OTHER; note = 2' fluoro-modified nucleoside
  modified_base 19: mod_base = OTHER; note = 2' O-methyl nucleoside with phosphorothioate linkage
  modified_base 20: mod_base = OTHER; note = 2' O-methyl nucleoside with phosphorothioate linkage
  modified_base 21: mod_base = OTHER; note = 2' O-methyl nucleoside
tgatgtgaaaaacttgtcatt

SEQ ID NO: 3709 - RNA, 21 nt, synthetic construct
  source 1..21: mol_type = other RNA
  modified_base 1: mod_base = OTHER; note = 2' O-methyl nucleoside with phosphorothioate linkage
  modified_base 2: mod_base = OTHER; note = 2' fluoro-modified nucleoside with phosphorothioate linkage
  modified_base 3: mod_base = OTHER; note = 2' O-methyl nucleoside
  modified_base 4: mod_base = OTHER; note = 2' fluoro-modified nucleoside
  modified_base 5: mod_base = OTHER; note = 2' O-methyl nucleoside
  modified_base 6: mod_base = OTHER; note = 2' fluoro-modified nucleoside
  modified_base 7: mod_base = OTHER; note = 2' O-methyl nucleoside
  modified_base 8: mod_base = OTHER; note = 2' O-methyl nucleoside
  modified_base 9: mod_base = OTHER; note = 2' O-methyl nucleoside
  modified_base 10: mod_base = OTHER; note = 2' fluoro-modified nucleoside
  modified_base 11: mod_base = OTHER; note = 2' O-methyl nucleoside
  modified_base 12: mod_base = OTHER; note = 2' fluoro-modified nucleoside
  modified_base 13: mod_base = OTHER; note = 2' O-methyl nucleoside
  modified_base 14: mod_base = OTHER; note = 2' fluoro-modified nucleoside
  modified_base 15: mod_base = OTHER; note = 2' O-methyl nucleoside
  modified_base 16: mod_base = OTHER; note = 2' fluoro-modified nucleoside
  modified_base 17: mod_base = OTHER; note = 2' O-methyl nucleoside
  modified_base 18: mod_base = OTHER; note = 2' fluoro-modified nucleoside
  modified_base 19: mod_base = OTHER; note = 2' O-methyl nucleoside with phosphorothioate linkage
  modified_base 20: mod_base = OTHER; note = 2' O-methyl nucleoside with phosphorothioate linkage
  modified_base 21: mod_base = OTHER; note = 2' O-methyl nucleoside
tgatgtgaaaaacttgtcatt

SEQ ID NO: 3710 - RNA, 21 nt, synthetic construct
  source 1..21: mol_type = other RNA
  modified_base 1: mod_base = OTHER; note = 2' O-methyl nucleoside with phosphorothioate linkage
  modified_base 2: mod_base = OTHER; note = 2' fluoro-modified nucleoside with phosphorothioate linkage
  modified_base 3: mod_base = OTHER; note = 2' O-methyl nucleoside
  modified_base 4: mod_base = OTHER; note = 2' fluoro-modified nucleoside
  modified_base 5: mod_base = OTHER; note = 2' O-methyl nucleoside
  modified_base 6: mod_base = OTHER; note = 2' O-methyl nucleoside
  modified_base 7: mod_base = OTHER; note = 2' fluoro-modified nucleoside
  modified_base 8: mod_base = OTHER; note = 2' fluoro-modified nucleoside
  modified_base 9: mod_base = OTHER; note = 2' O-methyl nucleoside
  modified_base 10: mod_base = OTHER; note = 2' fluoro-modified nucleoside
  modified_base 11: mod_base = OTHER; note = 2' O-methyl nucleoside
  modified_base 12: mod_base = OTHER; note = 2' fluoro-modified nucleoside
  modified_base 13: mod_base = OTHER; note = 2' O-methyl nucleoside
  modified_base 14: mod_base = OTHER; note = 2' fluoro-modified nucleoside
  modified_base 15: mod_base = OTHER; note = 2' O-methyl nucleoside
  modified_base 16: mod_base = OTHER; note = 2' fluoro-modified nucleoside
  modified_base 17: mod_base = OTHER; note = 2' O-methyl nucleoside
  modified_base 18: mod_base = OTHER; note = 2' fluoro-modified nucleoside
  modified_base 19: mod_base = OTHER; note = 2' O-methyl nucleoside with phosphorothioate linkage
  modified_base 20: mod_base = OTHER; note = 2' O-methyl nucleoside with phosphorothioate linkage
  modified_base 21: mod_base = OTHER; note = 2' O-methyl nucleoside
tgatgtgaaaaacttgtcatt

SEQ ID NO: 3711 - RNA, 21 nt, synthetic construct
  source 1..21: mol_type = other RNA
  modified_base 1: mod_base = OTHER; note = 2' O-methyl nucleoside with phosphorothioate linkage
  modified_base 2: mod_base = OTHER; note = 2' fluoro-modified nucleoside with phosphorothioate linkage
  modified_base 3: mod_base = OTHER; note = 2' O-methyl nucleoside
  modified_base 4: mod_base = OTHER; note = 2' fluoro-modified nucleoside
  modified_base 5: mod_base = OTHER; note = 2' O-methyl nucleoside
  modified_base 6: mod_base = OTHER; note = 2' O-methyl nucleoside
  modified_base 7: mod_base = OTHER; note = 2' fluoro-modified nucleoside
  modified_base 8: mod_base = OTHER; note = 2' O-methyl nucleoside
  modified_base 9: mod_base = OTHER; note = 2' O-methyl nucleoside
  modified_base 10: mod_base = OTHER; note = 2' O-methyl nucleoside
  modified_base 11: mod_base = OTHER; note = 2' O-methyl nucleoside
  modified_base 12: mod_base = OTHER; note = 2' fluoro-modified nucleoside
  modified_base 13: mod_base = OTHER; note = 2' O-methyl nucleoside
  modified_base 14: mod_base = OTHER; note = 2' fluoro-modified nucleoside
  modified_base 15: mod_base = OTHER; note = 2' O-methyl nucleoside
  modified_base 16: mod_base = OTHER; note = 2' fluoro-modified nucleoside
  modified_base 17: mod_base = OTHER; note = 2' O-methyl nucleoside
  modified_base 18: mod_base = OTHER; note = 2' fluoro-modified nucleoside
  modified_base 19: mod_base = OTHER; note = 2' O-methyl nucleoside with phosphorothioate linkage
  modified_base 20: mod_base = OTHER; note = 2' O-methyl nucleoside with phosphorothioate linkage
  modified_base 21: mod_base = OTHER; note = 2' O-methyl nucleoside
tgatgtgaaaaacttgtcatt

SEQ ID NO: 3712 - RNA, 21 nt, synthetic construct
  source 1..21: mol_type = other RNA
  modified_base 1: mod_base = OTHER; note = 2' O-methyl nucleoside with phosphorothioate linkage
  modified_base 2: mod_base = OTHER; note = 2' fluoro-modified nucleoside with phosphorothioate linkage
  modified_base 3: mod_base = OTHER; note = 2' O-methyl nucleoside
  modified_base 4: mod_base = OTHER; note = 2' O-methyl nucleoside
  modified_base 5: mod_base = OTHER; note = 2' O-methyl nucleoside
  modified_base 6: mod_base = OTHER; note = 2' fluoro-modified nucleoside
  modified_base 7: mod_base = OTHER; note = 2' O-methyl nucleoside
  modified_base 8: mod_base = OTHER; note = 2' fluoro-modified nucleoside
  modified_base 9: mod_base = OTHER; note = 2' O-methyl nucleoside
  modified_base 10: mod_base = OTHER; note = 2' O-methyl nucleoside
  modified_base 11: mod_base = OTHER; note = 2' O-methyl nucleoside
  modified_base 12: mod_base = OTHER; note = 2' fluoro-modified nucleoside
  modified_base 13: mod_base = OTHER; note = 2' O-methyl nucleoside
  modified_base 14: mod_base = OTHER; note = 2' fluoro-modified nucleoside
  modified_base 15: mod_base = OTHER; note = 2' O-methyl nucleoside
  modified_base 16: mod_base = OTHER; note = 2' fluoro-modified nucleoside
  modified_base 17: mod_base = OTHER; note = 2' O-methyl nucleoside
  modified_base 18: mod_base = OTHER; note = 2' fluoro-modified nucleoside
  modified_base 19: mod_base = OTHER; note = 2' O-methyl nucleoside with phosphorothioate linkage
  modified_base 20: mod_base = OTHER; note = 2' O-methyl nucleoside with phosphorothioate linkage
  modified_base 21: mod_base = OTHER; note = 2' O-methyl nucleoside
tgatgtgaaaaacttgtcatt

SEQ ID NO: 3713 - RNA, 19 nt, synthetic construct
  source 1..19: mol_type = other RNA
gatgaaagattcggtagta

SEQ ID NO: 3714 - RNA, 19 nt, synthetic construct
  source 1..19: mol_type = other RNA
gatgaaagattcggtagta

SEQ ID NO: 3715 - RNA, 19 nt, synthetic construct
  source 1..19: mol_type = other RNA
gatgaaagattcggtagta

SEQ ID NO: 3716 - RNA, 19 nt, synthetic construct
  source 1..19: mol_type = other RNA
gatgaaagattcggtagta

SEQ ID NO: 3717 - RNA, 19 nt, synthetic construct
  source 1..19: mol_type = other RNA
gatgaaagattcggtagta

SEQ ID NO: 3718 - RNA, 19 nt, synthetic construct
  source 1..19: mol_type = other RNA
tgacaagtttttcacatca

SEQ ID NO: 3719 - RNA, 19 nt, synthetic construct
  source 1..19: mol_type = other RNA
tgacaagtttttcacatca

SEQ ID NO: 3720 - RNA, 19 nt, synthetic construct
  source 1..19: mol_type = other RNA
tgacaagtttttcacatca

SEQ ID NO: 3721 - RNA, 19 nt, synthetic construct
  source 1..19: mol_type = other RNA
tgacaagtttttcacatca

SEQ ID NO: 3722 - RNA, 19 nt, synthetic construct
  source 1..19: mol_type = other RNA
  modified_base 9: mod_base = OTHER; note = Thymine
taccaaggtggcacttaca

SEQ ID NO: 3723 - RNA, 19 nt, synthetic construct
  source 1..19: mol_type = other RNA
tgacaagtttttcacatca

SEQ ID NO: 3724 - RNA, 19 nt, synthetic construct
  source 1..19: mol_type = other RNA
gatgaaagattcggtagta

SEQ ID NO: 3725 - RNA, 19 nt, synthetic construct
  source 1..19: mol_type = other RNA
tgacaagtttttcacatca

SEQ ID NO: 3726 - RNA, 19 nt, synthetic construct
  source 1..19: mol_type = other RNA
gaagattcatttgataaga

SEQ ID NO: 3727 - RNA, 19 nt, synthetic construct
  source 1..19: mol_type = other RNA
gatgaaagattcggtagta

SEQ ID NO: 3728 - RNA, 19 nt, synthetic construct
  source 1..19: mol_type = other RNA
agacatcatgagttggtca

SEQ ID NO: 3729 - RNA, 19 nt, synthetic construct
  source 1..19: mol_type = other RNA
gacaagtttttcacatcca

SEQ ID NO: 3730 - RNA, 19 nt, synthetic construct
  source 1..19: mol_type = other RNA
  modified_base 9: mod_base = OTHER; note = Thymine
taccaaggtggcacttaca

SEQ ID NO: 3731 - RNA, 19 nt, synthetic construct
  source 1..19: mol_type = other RNA
accaaggtggcacttacta

SEQ ID NO: 3732 - RNA, 19 nt, synthetic construct
  source 1..19: mol_type = other RNA
tgacaagtttttcacatca

SEQ ID NO: 3733 - RNA, 19 nt, synthetic construct
  source 1..19: mol_type = other RNA
gatgaaagattcggtagta

SEQ ID NO: 3734 - RNA, 19 nt, synthetic construct
  source 1..19: mol_type = other RNA
gatgaaagattcggtagta

SEQ ID NO: 3735 - RNA, 19 nt, synthetic construct
  source 1..19: mol_type = other RNA
tgacaagtttttcacatca

SEQ ID NO: 3736 - skipped

SEQ ID NO: 3737 - RNA, 19 nt, synthetic construct
  source 1..19: mol_type = other RNA
gatgaaagattcggtagta

SEQ ID NO: 3738 - RNA, 19 nt, synthetic construct
  source 1..19: mol_type = other RNA
gaagattcatttgataaga

SEQ ID NO: 3739 - RNA, 19 nt, synthetic construct
  source 1..19: mol_type = other RNA
gatgaaagattcggtagta

SEQ ID NO: 3740 - RNA, 19 nt, synthetic construct
  source 1..19: mol_type = other RNA
gatgaaagattcggtagta

SEQ ID NO: 3741 - RNA, 19 nt, synthetic construct
  source 1..19: mol_type = other RNA
gatgaaagattcggtagta

SEQ ID NO: 3742 - RNA, 19 nt, synthetic construct
  source 1..19: mol_type = other RNA
gatgaaagattcggtagta

SEQ ID NO: 3743 - RNA, 19 nt, synthetic construct
  source 1..19: mol_type = other RNA
gatgaaagattcggtagta

SEQ ID NO: 3744 - RNA, 19 nt, synthetic construct
  source 1..19: mol_type = other RNA
gatgaaagattcggtagta

SEQ ID NO: 3745 - RNA, 19 nt, synthetic construct
  source 1..19: mol_type = other RNA
gatgaaagattcggtagta

SEQ ID NO: 3746 - RNA, 19 nt, synthetic construct
  source 1..19: mol_type = other RNA
ctcaatggagtttattaca

SEQ ID NO: 3747 - RNA, 19 nt, synthetic construct
  source 1..19: mol_type = other RNA
tgacaagtttttcacatca

SEQ ID NO: 3748 - RNA, 19 nt, synthetic construct
  source 1..19: mol_type = other RNA
tcaatggagtttattacca

SEQ ID NO: 3749 - RNA, 19 nt, synthetic construct
  source 1..19: mol_type = other RNA
tactaccgaatctttcatc

SEQ ID NO: 3750 - RNA, 19 nt, synthetic construct
  source 1..19: mol_type = other RNA
tcttatcaaatgaatcttc

SEQ ID NO: 3751 - RNA, 19 nt, synthetic construct
  source 1..19: mol_type = other RNA
tactaccgaatctttcatc

SEQ ID NO: 3752 - RNA, 19 nt, synthetic construct
  source 1..19: mol_type = other RNA
tactaccgaatctttcatc

SEQ ID NO: 3753 - RNA, 19 nt, synthetic construct
  source 1..19: mol_type = other RNA
tcttatcaaatgaatcttc

SEQ ID NO: 3754 - RNA, 19 nt, synthetic construct
  source 1..19: mol_type = other RNA
tcttatcaaatgaatcttc

SEQ ID NO: 3755 - RNA, 19 nt, synthetic construct
  source 1..19: mol_type = other RNA
tgtaataaactccattgag

SEQ ID NO: 3756 - RNA, 19 nt, synthetic construct
  source 1..19: mol_type = other RNA
tggtaataaactccattga

SEQ ID NO: 3757 - RNA, 19 nt, synthetic construct
  source 1..19: mol_type = other RNA
tactaccgaatctttcatc

SEQ ID NO: 3758 - RNA, 19 nt, synthetic construct
  source 1..19: mol_type = other RNA
tactaccgaatctttcatc

SEQ ID NO: 3759 - RNA, 19 nt, synthetic construct
  source 1..19: mol_type = other RNA
tcttatcaaatgaatcttc

SEQ ID NO: 3760 - RNA, 19 nt, synthetic construct
  source 1..19: mol_type = other RNA
tactaccgaatctttcatc

SEQ ID NO: 3761 - RNA, 19 nt, synthetic construct
  source 1..19: mol_type = other RNA
tactaccgaatctttcatc

SEQ ID NO: 3762 - RNA, 19 nt, synthetic construct
  source 1..19: mol_type = other RNA
tactaccgaatctttcatc

SEQ ID NO: 3763 - RNA, 19 nt, synthetic construct
  source 1..19: mol_type = other RNA
tgaccaactcatgatgtct

SEQ ID NO: 3764 - RNA, 19 nt, synthetic construct
  source 1..19: mol_type = other RNA
tgttctgccattccagtct

SEQ ID NO: 3765 - RNA, 19 nt, synthetic construct
  source 1..19: mol_type = other RNA
tgatgtgaaaaacttgtca

SEQ ID NO: 3766 - RNA, 19 nt, synthetic construct
  source 1..19: mol_type = other RNA
tggatgtgaaaaacttgtc

SEQ ID NO: 3767 - RNA, 19 nt, synthetic construct
  source 1..19: mol_type = other RNA
tcaccttggtaataaactc

SEQ ID NO: 3768 - RNA, 19 nt, synthetic construct
  source 1..19: mol_type = other RNA
tgtaagtgccaccttggta

SEQ ID NO: 3769 - RNA, 19 nt, synthetic construct
  source 1..19: mol_type = other RNA
tagtaagtgccaccttggt

SEQ ID NO: 3770 - RNA, 19 nt, synthetic construct
  source 1..19: mol_type = other RNA
tttgagtaagtgccacctt

SEQ ID NO: 3771 - RNA, 19 nt, synthetic construct
  source 1..19: mol_type = other RNA
ttttgagtaagtgccacct

SEQ ID NO: 3772 - skipped

SEQ ID NO: 3773 - RNA, 19 nt, synthetic construct
  source 1..19: mol_type = other RNA
  modified_base 4: mod_base = OTHER; note = Thymine
tactaccgaatctttcatc

SEQ ID NO: 3774 - RNA, 19 nt, synthetic construct
  source 1..19: mol_type = other RNA
  modified_base 4: mod_base = OTHER; note = Thymine
  modified_base 14: mod_base = OTHER; note = Thymine
  modified_base 18: mod_base = OTHER; note = Thymine
tactaccgaatctttcatc

SEQ ID NO: 3775 - RNA, 19 nt, synthetic construct
  source 1..19: mol_type = other RNA
tactaccgaatctttcatc

SEQ ID NO: 3776 - RNA, 19 nt, synthetic construct
  source 1..19: mol_type = other RNA
  modified_base 1: mod_base = OTHER; note = Thymine
tactaccgaatctttcatc

SEQ ID NO: 3777 - RNA, 19 nt, synthetic construct
  source 1..19: mol_type = other RNA
tactaccgaatctttcatc

SEQ ID NO: 3778 - RNA, 19 nt, synthetic construct
  source 1..19: mol_type = other RNA
tgatgtgaaaaacttgtca

SEQ ID NO: 3779 - RNA, 19 nt, synthetic construct
  source 1..19: mol_type = other RNA
tgatgtgaaaaacttgtca

SEQ ID NO: 3780 - RNA, 19 nt, synthetic construct
  source 1..19: mol_type = other RNA
tgatgtgaaaaacttgtca

SEQ ID NO: 3781 - RNA, 19 nt, synthetic construct
  source 1..19: mol_type = other RNA
tgatgtgaaaaacttgtca

SEQ ID NO: 3782 - RNA, 19 nt, synthetic construct
  source 1..19: mol_type = other RNA
tgatgtgaaaaacttgtca

SEQ ID NO: 3783 - RNA, 19 nt, synthetic construct
  source 1..19: mol_type = other RNA
tgatgtgaaaaacttgtca

SEQ ID NO: 3784 - RNA, 19 nt, synthetic construct
  source 1..19: mol_type = other RNA
tgatgtgaaaaacttgtca

SEQ ID NO: 3785 - RNA, 21 nt, synthetic construct
  source 1..21: mol_type = other RNA
gatgaaagattcggtagtatt

SEQ ID NO: 3786 - RNA, 21 nt, synthetic construct
  source 1..21: mol_type = other RNA
gatgaaagattcggtagtatt

SEQ ID NO: 3787 - RNA, 21 nt, synthetic construct
  source 1..21: mol_type = other RNA
gatgaaagattcggtagtatt

SEQ ID NO: 3788 - RNA, 21 nt, synthetic construct
  source 1..21: mol_type = other RNA
tgacaagtttttcacatcatt

SEQ ID NO: 3789 - RNA, 21 nt, synthetic construct
  source 1..21: mol_type = other RNA
tgacaagtttttcacatcatt

SEQ ID NO: 3790 - RNA, 21 nt, synthetic construct
  source 1..21: mol_type = other RNA
tactaccgaatctttcatctt

SEQ ID NO: 3791 - RNA, 21 nt, synthetic construct
  source 1..21: mol_type = other RNA
tactaccgaatctttcatctt

SEQ ID NO: 3792 - RNA, 21 nt, synthetic construct
  source 1..21: mol_type = other RNA
tactaccgaatctttcatctt

SEQ ID NO: 3793 - RNA, 21 nt, synthetic construct
  source 1..21: mol_type = other RNA
tgatgtgaaaaacttgtcatt

SEQ ID NO: 3794 - RNA, 21 nt, synthetic construct
  source 1..21: mol_type = other RNA
tgatgtgaaaaacttgtcatt

SEQ ID NO: 3795 - RNA, 21 nt, synthetic construct
  source 1..21: mol_type = other RNA
  misc_feature 1: note = ETL17 moiety with a phosphorothioate linkage
  modified_base 1: mod_base = OTHER; note = 2' O-methyl nucleoside
  modified_base 2: mod_base = OTHER; note = 2' O-methyl nucleoside
  modified_base 3: mod_base = OTHER; note = 2' O-methyl nucleoside
  modified_base 4: mod_base = OTHER; note = 2' methoxy ethyl nucleoside
  modified_base 5: mod_base = OTHER; note = 2' O-methyl nucleoside
  modified_base 6: mod_base = OTHER; note = 2' fluoro-modified nucleoside
  modified_base 7: mod_base = OTHER; note = 2' fluoro-modified nucleoside
  modified_base 8: mod_base = OTHER; note = 2' fluoro-modified nucleoside
  modified_base 9: mod_base = OTHER; note = 2' fluoro-modified nucleoside
  modified_base 10: mod_base = OTHER; note = 2' O-methyl nucleoside
  modified_base 11: mod_base = OTHER; note = 2' O-methyl nucleoside
  modified_base 12: mod_base = OTHER; note = 2' O-methyl nucleoside
  modified_base 13: mod_base = OTHER; note = 2' methoxy ethyl nucleoside
  modified_base 14: mod_base = OTHER; note = 2' O-methyl nucleoside
  modified_base 15: mod_base = OTHER; note = 2' O-methyl nucleoside
  modified_base 16: mod_base = OTHER; note = 2' O-methyl nucleoside
  modified_base 17: mod_base = OTHER; note = 2' O-methyl nucleoside
  modified_base 18: mod_base = OTHER; note = 2' O-methyl nucleoside
  modified_base 19: mod_base = OTHER; note = 2' O-methyl nucleoside with phosphorothioate linkage
  modified_base 20: mod_base = OTHER; note = 2' O-methyl nucleoside with phosphorothioate linkage
  modified_base 21: mod_base = OTHER; note = 2' O-methyl nucleoside
gatgaaagattcggtagtatt

SEQ ID NO: 3796 - RNA, 21 nt, synthetic construct
  source 1..21: mol_type = other RNA
  misc_feature 1: note = ETL17 moiety with a phosphorothioate linkage
  modified_base 1: mod_base = OTHER; note = 2' O-methyl nucleoside
  modified_base 2: mod_base = OTHER; note = 2' O-methyl nucleoside
  modified_base 3: mod_base = OTHER; note = 2' O-methyl nucleoside
  modified_base 4: mod_base = OTHER; note = 2' methoxy ethyl nucleoside
  modified_base 5: mod_base = OTHER; note = 2' O-methyl nucleoside
  modified_base 6: mod_base = OTHER; note = 2' fluoro-modified nucleoside
  modified_base 7: mod_base = OTHER; note = 2' fluoro-modified nucleoside
  modified_base 8: mod_base = OTHER; note = 2' fluoro-modified nucleoside
  modified_base 9: mod_base = OTHER; note = 2' fluoro-modified nucleoside
  modified_base 10: mod_base = OTHER; note = 2' O-methyl nucleoside
  modified_base 11: mod_base = OTHER; note = 2' O-methyl nucleoside
  modified_base 12: mod_base = OTHER; note = 2' methoxy ethyl nucleoside
  modified_base 13: mod_base = OTHER; note = 2' O-methyl nucleoside
  modified_base 14: mod_base = OTHER; note = 2' O-methyl nucleoside
  modified_base 15: mod_base = OTHER; note = 2' O-methyl nucleoside
  modified_base 16: mod_base = OTHER; note = 2' O-methyl nucleoside
  modified_base 17: mod_base = OTHER; note = 2' O-methyl nucleoside
  modified_base 18: mod_base = OTHER; note = 2' O-methyl nucleoside
  modified_base 19: mod_base = OTHER; note = 2' O-methyl nucleoside with phosphorothioate linkage
  modified_base 20: mod_base = OTHER; note = 2' O-methyl nucleoside with phosphorothioate linkage
  modified_base 21: mod_base = OTHER; note = 2' O-methyl nucleoside
gatgaaagattcggtagtatt

SEQ ID NO: 3797 - RNA, 21 nt, synthetic construct
  source 1..21: mol_type = other RNA
  misc_feature 1: note = ETL17 moiety with a phosphorothioate linkage
  modified_base 1: mod_base = OTHER; note = 2' O-methyl nucleoside
  modified_base 2: mod_base = OTHER; note = 2' O-methyl nucleoside
  modified_base 3: mod_base = OTHER; note = 2' O-methyl nucleoside
  modified_base 4: mod_base = OTHER; note = 2' methoxy ethyl nucleoside
  modified_base 5: mod_base = OTHER; note = 2' O-methyl nucleoside
  modified_base 6: mod_base = OTHER; note = 2' fluoro-modified nucleoside
  modified_base 7: mod_base = OTHER; note = 2' fluoro-modified nucleoside
  modified_base 8: mod_base = OTHER; note = 2' fluoro-modified nucleoside
  modified_base 9: mod_base = OTHER; note = 2' fluoro-modified nucleoside
  modified_base 10: mod_base = OTHER; note = 2' O-methyl nucleoside
  modified_base 11: mod_base = OTHER; note = 2' methoxy ethyl thymine
  modified_base 12: mod_base = OTHER; note = 2' O-methyl nucleoside
  modified_base 13: mod_base = OTHER; note = 2' O-methyl nucleoside
  modified_base 14: mod_base = OTHER; note = 2' O-methyl nucleoside
  modified_base 15: mod_base = OTHER; note = 2' O-methyl nucleoside
  modified_base 16: mod_base = OTHER; note = 2' O-methyl nucleoside
  modified_base 17: mod_base = OTHER; note = 2' O-methyl nucleoside
  modified_base 18: mod_base = OTHER; note = 2' O-methyl nucleoside
  modified_base 19: mod_base = OTHER; note = 2' O-methyl nucleoside with phosphorothioate linkage
  modified_base 20: mod_base = OTHER; note = 2' O-methyl nucleoside with phosphorothioate linkage
  modified_base 21: mod_base = OTHER; note = 2' O-methyl nucleoside
gatgaaagattcggtagtatt

SEQ ID NO: 3798 - RNA, 21 nt, synthetic construct
  source 1..21: mol_type = other RNA
  misc_feature 1: note = ETL17 moiety with a phosphorothioate linkage
  modified_base 1: mod_base = OTHER; note = 2' O-methyl nucleoside
  modified_base 2: mod_base = OTHER; note = 2' O-methyl nucleoside
  modified_base 3: mod_base = OTHER; note = 2' O-methyl nucleoside
  modified_base 4: mod_base = OTHER; note = 2' O-methyl nucleoside
  modified_base 5: mod_base = OTHER; note = 2' methoxy ethyl nucleoside
  modified_base 6: mod_base = OTHER; note = 2' fluoro-modified nucleoside
  modified_base 7: mod_base = OTHER; note = 2' fluoro-modified nucleoside
  modified_base 8: mod_base = OTHER; note = 2' fluoro-modified nucleoside
  modified_base 9: mod_base = OTHER; note = 2' fluoro-modified nucleoside
  modified_base 10: mod_base = OTHER; note = 2' O-methyl nucleoside
  modified_base 11: mod_base = OTHER; note = 2' O-methyl nucleoside
  modified_base 12: mod_base = OTHER; note = 2' methoxy ethyl nucleoside
  modified_base 13: mod_base = OTHER; note = 2' O-methyl nucleoside
  modified_base 14: mod_base = OTHER; note = 2' O-methyl nucleoside
  modified_base 15: mod_base = OTHER; note = 2' O-methyl nucleoside
  modified_base 16: mod_base = OTHER; note = 2' O-methyl nucleoside
  modified_base 17: mod_base = OTHER; note = 2' O-methyl nucleoside
  modified_base 18: mod_base = OTHER; note = 2' O-methyl nucleoside
  modified_base 19: mod_base = OTHER; note = 2' O-methyl nucleoside with phosphorothioate linkage
  modified_base 20: mod_base = OTHER; note = 2' O-methyl nucleoside with phosphorothioate linkage
  modified_base 21: mod_base = OTHER; note = 2' O-methyl nucleoside
gatgaaagattcggtagtatt

SEQ ID NO: 3799 - RNA, 21 nt, synthetic construct
  source 1..21: mol_type = other RNA
  misc_feature 1: note = ETL17 moiety with a phosphorothioate linkage
  modified_base 1: mod_base = OTHER; note = 2' O-methyl nucleoside
  modified_base 2: mod_base = OTHER; note = 2' O-methyl nucleoside
  modified_base 3: mod_base = OTHER; note = 2' O-methyl nucleoside
  modified_base 4: mod_base = OTHER; note = 2' methoxy ethyl nucleoside
  modified_base 5: mod_base = OTHER; note = 2' O-methyl nucleoside
  modified_base 6: mod_base = OTHER; note = 2' fluoro-modified nucleoside
  modified_base 7: mod_base = OTHER; note = 2' fluoro-modified nucleoside
  modified_base 8: mod_base = OTHER; note = 2' fluoro-modified nucleoside
  modified_base 9: mod_base = OTHER; note = 2' fluoro-modified nucleoside
  modified_base 10: mod_base = OTHER; note = 2' O-methyl nucleoside
  modified_base 11: mod_base = OTHER; note = 2' O-methyl nucleoside
  modified_base 12: mod_base = OTHER; note = 2' O-methyl nucleoside
  modified_base 13: mod_base = OTHER; note = 2' O-methyl nucleoside
  modified_base 14: mod_base = OTHER; note = 2' O-methyl nucleoside
  modified_base 15: mod_base = OTHER; note = 2' methoxy ethyl nucleoside
  modified_base 16: mod_base = OTHER; note = 2' O-methyl nucleoside
  modified_base 17: mod_base = OTHER; note = 2' O-methyl nucleoside
  modified_base 18: mod_base = OTHER; note = 2' O-methyl nucleoside
  modified_base 19: mod_base = OTHER; note = 2' O-methyl nucleoside with phosphorothioate linkage
  modified_base 20: mod_base = OTHER; note = 2' O-methyl nucleoside with phosphorothioate linkage
  modified_base 21: mod_base = OTHER; note = 2' O-methyl nucleoside
tgacaagtttttcacatcatt

SEQ ID NO: 3800 - RNA, 21 nt, synthetic construct
  source 1..21: mol_type = other RNA
  misc_feature 1: note = ETL17 moiety with a phosphorothioate linkage
  modified_base 1: mod_base = OTHER; note = 2' O-methyl nucleoside
  modified_base 2: mod_base = OTHER; note = 2' O-methyl nucleoside
  modified_base 3: mod_base = OTHER; note = 2' O-methyl nucleoside
  modified_base 4: mod_base = OTHER; note = 2' methoxy ethyl nucleoside
  modified_base 5: mod_base = OTHER; note = 2' O-methyl nucleoside
  modified_base 6: mod_base = OTHER; note = 2' fluoro-modified nucleoside
  modified_base 7: mod_base = OTHER; note = 2' fluoro-modified nucleoside
  modified_base 8: mod_base = OTHER; note = 2' fluoro-modified nucleoside
  modified_base 9: mod_base = OTHER; note = 2' fluoro-modified nucleoside
  modified_base 10: mod_base = OTHER; note = 2' O-methyl nucleoside
  modified_base 11: mod_base = OTHER; note = 2' O-methyl nucleoside
  modified_base 12: mod_base = OTHER; note = 2' O-methyl nucleoside
  modified_base 13: mod_base = OTHER; note = 2' O-methyl nucleoside
  modified_base 14: mod_base = OTHER; note = 2' methoxy ethyl nucleoside
  modified_base 15: mod_base = OTHER; note = 2' O-methyl nucleoside
  modified_base 16: mod_base = OTHER; note = 2' O-methyl nucleoside
  modified_base 17: mod_base = OTHER; note = 2' O-methyl nucleoside
  modified_base 18: mod_base = OTHER; note = 2' O-methyl nucleoside
  modified_base 19: mod_base = OTHER; note = 2' O-methyl nucleoside with phosphorothioate linkage
  modified_base 20: mod_base = OTHER; note = 2' O-methyl nucleoside with phosphorothioate linkage
  modified_base 21: mod_base = OTHER; note = 2' O-methyl nucleoside
tgacaagtttttcacatcatt

SEQ ID NO: 3801 - RNA, 21 nt, synthetic construct
  source 1..21: mol_type = other RNA
  misc_feature 1: note = ETL17 moiety with a phosphorothioate linkage
  modified_base 1: mod_base = OTHER; note = 2' O-methyl nucleoside
  modified_base 2: mod_base = OTHER; note = 2' O-methyl nucleoside
  modified_base 3: mod_base = OTHER; note = 2' O-methyl nucleoside
  modified_base 4: mod_base = OTHER; note = 2' methoxy ethyl nucleoside
  modified_base 5: mod_base = OTHER; note = 2' O-methyl nucleoside
  modified_base 6: mod_base = OTHER; note = 2' fluoro-modified nucleoside
  modified_base 7: mod_base = OTHER; note = 2' fluoro-modified nucleoside
  modified_base 8: mod_base = OTHER; note = 2' fluoro-modified nucleoside
  modified_base 9: mod_base = OTHER; note = 2' fluoro-modified nucleoside
  modified_base 10: mod_base = OTHER; note = 2' O-methyl nucleoside
  modified_base 11: mod_base = OTHER; note = 2' O-methyl nucleoside
  modified_base 12: mod_base = OTHER; note = 2' O-methyl nucleoside
  modified_base 13: mod_base = OTHER; note = 2' methoxy ethyl nucleoside
  modified_base 14: mod_base = OTHER; note = 2' O-methyl nucleoside
  modified_base 15: mod_base = OTHER; note = 2' O-methyl nucleoside
  modified_base 16: mod_base = OTHER; note = 2' O-methyl nucleoside
  modified_base 17: mod_base = OTHER; note = 2' O-methyl nucleoside
  modified_base 18: mod_base = OTHER; note = 2' O-methyl nucleoside
  modified_base 19: mod_base = OTHER; note = 2' O-methyl nucleoside with phosphorothioate linkage
  modified_base 20: mod_base = OTHER; note = 2' O-methyl nucleoside with phosphorothioate linkage
  modified_base 21: mod_base = OTHER; note = 2' O-methyl nucleoside
tgacaagtttttcacatcatt

SEQ ID NO: 3802 - RNA, 21 nt, synthetic construct
  source 1..21: mol_type = other RNA
  misc_feature 1: note = ETL17 moiety with a phosphorothioate linkage
  modified_base 1: mod_base = OTHER; note = 2' O-methyl nucleoside
  modified_base 2: mod_base = OTHER; note = 2' O-methyl nucleoside
  modified_base 3: mod_base = OTHER; note = 2' O-methyl nucleoside
  modified_base 4: mod_base = OTHER; note = 2' methoxy ethyl nucleoside
  modified_base 5: mod_base = OTHER; note = 2' O-methyl nucleoside
  modified_base 6: mod_base = OTHER; note = 2' fluoro-modified nucleoside
  modified_base 7: mod_base = OTHER; note = 2' fluoro-modified nucleoside
  modified_base 8: mod_base = OTHER; note = 2' fluoro-modified nucleoside
  modified_base 9: mod_base = OTHER; note = 2' fluoro-modified nucleoside
  modified_base 10: mod_base = OTHER; note = 2' O-methyl nucleoside
  modified_base 11: mod_base = OTHER; note = 2' O-methyl nucleoside
  modified_base 12: mod_base = OTHER; note = 2' O-methyl nucleoside
  modified_base 13: mod_base = OTHER; note = 2' O-methyl nucleoside
  modified_base 14: mod_base = OTHER; note = 2' methoxy ethyl thymine
  modified_base 15: mod_base = OTHER; note = 2' O-methyl nucleoside
  modified_base 16: mod_base = OTHER; note = 2' O-methyl nucleoside
  modified_base 17: mod_base = OTHER; note = 2' O-methyl nucleoside
  modified_base 18: mod_base = OTHER; note = 2' O-methyl nucleoside
  modified_base 19: mod_base = OTHER; note = 2' O-methyl nucleoside with phosphorothioate linkage
  modified_base 20: mod_base = OTHER; note = 2' O-methyl nucleoside with phosphorothioate linkage
  modified_base 21: mod_base = OTHER; note = 2' O-methyl nucleoside
gagaagattcatttgataatt

SEQ ID NO: 3803 - RNA, 21 nt, synthetic construct
  source 1..21: mol_type = other RNA
  modified_base 1: mod_base = OTHER; note = 2' O-methyl nucleoside with phosphorothioate linkage
  modified_base 2: mod_base = OTHER; note = 2' fluoro-modified nucleoside with phosphorothioate linkage
  modified_base 3: mod_base = OTHER; note = 2' O-methyl nucleoside
  modified_base 4: mod_base = OTHER; note = 2' fluoro-modified nucleoside
  modified_base 5: mod_base = OTHER; note = 2' O-methyl nucleoside
  modified_base 6: mod_base = OTHER; note = 2' fluoro-modified nucleoside
  modified_base 7: mod_base = OTHER; note = 2' O-methyl nucleoside
  modified_base 8: mod_base = OTHER; note = 2' fluoro-modified nucleoside
  modified_base 9: mod_base = OTHER; note = 2' O-methyl nucleoside
  modified_base 10: mod_base = OTHER; note = 2' fluoro-modified nucleoside
  modified_base 11: mod_base = OTHER; note = 2' O-methyl nucleoside
  modified_base 12: mod_base = OTHER; note = 2' fluoro-modified nucleoside
  modified_base 13: mod_base = OTHER; note = 2' O-methyl nucleoside
  modified_base 14: mod_base = OTHER; note = 2' fluoro-modified nucleoside
  modified_base 15: mod_base = OTHER; note = 2' O-methyl nucleoside
  modified_base 16: mod_base = OTHER; note = 2' fluoro-modified nucleoside
  modified_base 17: mod_base = OTHER; note = 2' O-methyl nucleoside
  modified_base 18: mod_base = OTHER; note = 2' fluoro-modified nucleoside
  modified_base 19: mod_base = OTHER; note = 2' O-methyl nucleoside with phosphorothioate linkage
  modified_base 20: mod_base = OTHER; note = 2' O-methyl nucleoside with phosphorothioate linkage
  modified_base 21: mod_base = OTHER; note = 2' O-methyl nucleoside
ttatcaaatgaatcttctctt

SEQ ID NO: 3804 - RNA, 21 nt, synthetic construct
  source 1..21: mol_type = other RNA
  modified_base 1: mod_base = OTHER; note = 2' O-methyl nucleoside with phosphorothioate linkage
  modified_base 2: mod_base = OTHER; note = 2' fluoro-modified nucleoside with phosphorothioate linkage
  modified_base 3: mod_base = OTHER; note = 2' O-methyl nucleoside
  modified_base 4: mod_base = OTHER; note = 2' fluoro-modified nucleoside
  modified_base 5: mod_base = OTHER; note = 2' O-methyl nucleoside
  modified_base 6: mod_base = OTHER; note = 2' O-methyl nucleoside
  modified_base 7: mod_base = OTHER; note = 2' fluoro-modified nucleoside
  modified_base 8: mod_base = OTHER; note = 2' O-methyl nucleoside
  modified_base 9: mod_base = OTHER; note = 2' O-methyl nucleoside
  modified_base 10: mod_base = OTHER; note = 2' fluoro-modified nucleoside
  modified_base 11: mod_base = OTHER; note = 2' O-methyl nucleoside
  modified_base 12: mod_base = OTHER; note = 2' fluoro-modified nucleoside
  modified_base 13: mod_base = OTHER; note = 2' O-methyl nucleoside
  modified_base 14: mod_base = OTHER; note = 2' fluoro-modified nucleoside
  modified_base 15: mod_base = OTHER; note = 2' O-methyl nucleoside
  modified_base 16: mod_base = OTHER; note = 2' O-methyl nucleoside
  modified_base 17: mod_base = OTHER; note = 2' O-methyl nucleoside
  modified_base 18: mod_base = OTHER; note = 2' O-methyl nucleoside
  modified_base 19: mod_base = OTHER; note = 2' O-methyl nucleoside with phosphorothioate linkage
  modified_base 20: mod_base = OTHER; note = 2' O-methyl nucleoside with phosphorothioate linkage
  modified_base 21: mod_base = OTHER; note = 2' O-methyl nucleoside
tactaccgaatctttcatctt

SEQ ID NO: 3805 - RNA, 21 nt, synthetic construct
  source 1..21: mol_type = other RNA
  modified_base 1: mod_base = OTHER; note = 2' O-methyl nucleoside with phosphorothioate linkage
  modified_base 2: mod_base = OTHER; note = 2' fluoro-modified nucleoside with phosphorothioate linkage
  modified_base 3: mod_base = OTHER; note = 2' O-methyl nucleoside
  modified_base 4: mod_base = OTHER; note = 2' O-methyl nucleoside
  modified_base 5: mod_base = OTHER; note = 2' O-methyl nucleoside
  modified_base 6: mod_base = OTHER; note = 2' fluoro-modified nucleoside
  modified_base 7: mod_base = OTHER; note = 2' O-methyl nucleoside
  modified_base 8: mod_base = OTHER; note = 2' fluoro-modified nucleoside
  modified_base 9: mod_base = OTHER; note = 2' O-methyl nucleoside
  modified_base 10: mod_base = OTHER; note = 2' fluoro-modified nucleoside
  modified_base 11: mod_base = OTHER; note = 2' O-methyl nucleoside
  modified_base 12: mod_base = OTHER; note = 2' fluoro-modified nucleoside
  modified_base 13: mod_base = OTHER; note = 2' O-methyl nucleoside
  modified_base 14: mod_base = OTHER; note = 2' fluoro-modified nucleoside
  modified_base 15: mod_base = OTHER; note = 2' O-methyl nucleoside
  modified_base 16: mod_base = OTHER; note = 2' fluoro-modified nucleoside
  modified_base 17: mod_base = OTHER; note = 2' O-methyl nucleoside
  modified_base 18: mod_base = OTHER; note = 2' O-methyl nucleoside
  modified_base 19: mod_base = OTHER; note = 2' O-methyl nucleoside with phosphorothioate linkage
  modified_base 20: mod_base = OTHER; note = 2' O-methyl nucleoside with phosphorothioate linkage
  modified_base 21: mod_base = OTHER; note = 2' O-methyl nucleoside
tactaccgaatctttcatctt

SEQ ID NO: 3806 - RNA, 21 nt, synthetic construct
  source 1..21: mol_type = other RNA
  modified_base 1: mod_base = OTHER; note = 2' O-methyl nucleoside with phosphorothioate linkage
  modified_base 2: mod_base = OTHER; note = 2' fluoro-modified nucleoside with phosphorothioate linkage
  modified_base 3: mod_base = OTHER; note = 2' O-methyl nucleoside
  modified_base 4: mod_base = OTHER; note = 2' O-methyl nucleoside
  modified_base 5: mod_base = OTHER; note = 2' O-methyl nucleoside
  modified_base 6: mod_base = OTHER; note = 2' fluoro-modified nucleoside
  modified_base 7: mod_base = OTHER; note = 2' O-methyl nucleoside
  modified_base 8: mod_base = OTHER; note = 2' fluoro-modified nucleoside
  modified_base 9: mod_base = OTHER; note = 2' O-methyl nucleoside
  modified_base 10: mod_base = OTHER; note = 2' fluoro-modified nucleoside
  modified_base 11: mod_base = OTHER; note = 2' O-methyl nucleoside
  modified_base 12: mod_base = OTHER; note = 2' fluoro-modified nucleoside
  modified_base 13: mod_base = OTHER; note = 2' O-methyl nucleoside
  modified_base 14: mod_base = OTHER; note = 2' fluoro-modified nucleoside
  modified_base 15: mod_base = OTHER; note = 2' O-methyl nucleoside
  modified_base 16: mod_base = OTHER; note = 2' O-methyl nucleoside
  modified_base 17: mod_base = OTHER; note = 2' O-methyl nucleoside
  modified_base 18: mod_base = OTHER; note = 2' O-methyl nucleoside
  modified_base 19: mod_base = OTHER; note = 2' O-methyl nucleoside with phosphorothioate linkage
  modified_base 20: mod_base = OTHER; note = 2' O-methyl nucleoside with phosphorothioate linkage
  modified_base 21: mod_base = OTHER; note = 2' O-methyl nucleoside
tactaccgaatctttcatctt

SEQ ID NO: 3807 - RNA, 21 nt, synthetic construct
  source 1..21: mol_type = other RNA
  modified_base 1: mod_base = OTHER; note = 2' O-methyl nucleoside with phosphorothioate linkage
  modified_base 2: mod_base = OTHER; note = 2' fluoro-modified nucleoside with phosphorothioate linkage
  modified_base 3: mod_base = OTHER; note = 2' O-methyl nucleoside
  modified_base 4: mod_base = OTHER; note = 2' O-methyl nucleoside
  modified_base 5: mod_base = OTHER; note = 2' O-methyl nucleoside
  modified_base 6: mod_base = OTHER; note = 2' fluoro-modified nucleoside
  modified_base 7: mod_base = OTHER; note = 2' O-methyl nucleoside
  modified_base 8: mod_base = OTHER; note = 2' fluoro-modified nucleoside
  modified_base 9: mod_base = OTHER; note = 2' O-methyl nucleoside
  modified_base 10: mod_base = OTHER; note = 2' fluoro-modified nucleoside
  modified_base 11: mod_base = OTHER; note = 2' O-methyl nucleoside
  modified_base 12: mod_base = OTHER; note = 2' fluoro-modified nucleoside
  modified_base 13: mod_base = OTHER; note = 2' O-methyl nucleoside
  modified_base 14: mod_base = OTHER; note = 2' fluoro-modified nucleoside
  modified_base 15: mod_base = OTHER; note = 2' O-methyl nucleoside
  modified_base 16: mod_base = OTHER; note = 2' fluoro-modified nucleoside
  modified_base 17: mod_base = OTHER; note = 2' O-methyl nucleoside
  modified_base 18: mod_base = OTHER; note = 2' O-methyl nucleoside
  modified_base 19: mod_base = OTHER; note = 2' O-methyl nucleoside with phosphorothioate linkage
  modified_base 20: mod_base = OTHER; note = 2' O-methyl nucleoside with phosphorothioate linkage
  modified_base 21: mod_base = OTHER; note = 2' O-methyl nucleoside
tactaccgaatctttcatctt

SEQ ID NO: 3808 - RNA, 21 nt, synthetic construct
  source 1..21: mol_type = other RNA
  modified_base 1: mod_base = OTHER; note = 2' O-methyl nucleoside with phosphorothioate linkage
  modified_base 2: mod_base = OTHER; note = 2' fluoro-modified nucleoside with phosphorothioate linkage
  modified_base 3: mod_base = OTHER; note = 2' O-methyl nucleoside
  modified_base 4: mod_base = OTHER; note = 2' O-methyl nucleoside
  modified_base 5: mod_base = OTHER; note = 2' O-methyl nucleoside
  modified_base 6: mod_base = OTHER; note = 2' fluoro-modified nucleoside
  modified_base 7: mod_base = OTHER; note = 2' O-methyl nucleoside
  modified_base 8: mod_base = OTHER; note = 2' fluoro-modified nucleoside
  modified_base 9: mod_base = OTHER; note = 2' O-methyl nucleoside
  modified_base 10: mod_base = OTHER; note = 2' fluoro-modified nucleoside
  modified_base 11: mod_base = OTHER; note = 2' O-methyl nucleoside
  modified_base 12: mod_base = OTHER; note = 2' fluoro-modified nucleoside
  modified_base 13: mod_base = OTHER; note = 2' O-methyl nucleoside
  modified_base 14: mod_base = OTHER; note = 2' fluoro-modified nucleoside
  modified_base 15: mod_base = OTHER; note = 2' O-methyl nucleoside
  modified_base 16: mod_base = OTHER; note = 2' O-methyl nucleoside
  modified_base 17: mod_base = OTHER; note = 2' O-methyl nucleoside
  modified_base 18: mod_base = OTHER; note = 2' O-methyl nucleoside
  modified_base 19: mod_base = OTHER; note = 2' O-methyl nucleoside with phosphorothioate linkage
  modified_base 20: mod_base = OTHER; note = 2' O-methyl nucleoside with phosphorothioate linkage
  modified_base 21: mod_base = OTHER; note = 2' O-methyl nucleoside
tactaccgaatctttcatctt

SEQ ID NO: 3809 - RNA, 18 nt, synthetic construct
  source 1..18: mol_type = other RNA
gatgaaagattcggtagt

SEQ ID NO: 3810 - RNA, 18 nt, synthetic construct
  source 1..18: mol_type = other RNA
tgacaagtttttcacatc

SEQ ID NO: 3811 - RNA, 18 nt, synthetic construct
  source 1..18: mol_type = other RNA
actaccgaatctttcatc

SEQ ID NO: 3812 - RNA, 18 nt, synthetic construct
  source 1..18: mol_type = other RNA
gatgtgaaaaacttgtca

SEQ ID NO: 3813 - RNA, 21 nt, synthetic construct
  source 1..21: mol_type = other RNA
  misc_feature 1: note = ETL17 moiety with a phosphorothioate linkage
  modified_base 1: mod_base = OTHER; note = 2' O-methyl nucleoside
  modified_base 2: mod_base = OTHER; note = 2' O-methyl nucleoside
  modified_base 3: mod_base = OTHER; note = 2' O-methyl nucleoside
  modified_base 4: mod_base = OTHER; note = 2' O-methyl nucleoside
  modified_base 5: mod_base = OTHER; note = 2' O-methyl nucleoside
  modified_base 6: mod_base = OTHER; note = 2' fluoro-modified nucleoside
  modified_base 7: mod_base = OTHER; note = 2' O-methyl nucleoside
  modified_base 8: mod_base = OTHER; note = 2' O-methyl nucleoside
  modified_base 9: mod_base = OTHER; note = 2' fluoro-modified nucleoside
  modified_base 10: mod_base = OTHER; note = 2' O-methyl nucleoside
  modified_base 11: mod_base = OTHER; note = 2' fluoro-modified nucleoside
  modified_base 12: mod_base = OTHER; note = 2' O-methyl nucleoside
  modified_base 13: mod_base = OTHER; note = 2' O-methyl nucleoside
  modified_base 14: mod_base = OTHER; note = 2' O-methyl nucleoside
  modified_base 15: mod_base = OTHER; note = 2' O-methyl nucleoside
  modified_base 16: mod_base = OTHER; note = 2' O-methyl nucleoside
  modified_base 17: mod_base = OTHER; note = 2' O-methyl nucleoside
  modified_base 18: mod_base = OTHER; note = 2' O-methyl nucleoside
  modified_base 19: mod_base = OTHER; note = 2' O-methyl nucleoside with phosphorothioate linkage
  modified_base 20: mod_base = OTHER; note = 2' O-methyl nucleoside with phosphorothioate linkage
  modified_base 21: mod_base = OTHER; note = 2' O-methyl nucleoside
cagacatcatgagttggtatt

SEQ ID NO: 3814 - RNA, 21 nt, synthetic construct
  source 1..21: mol_type = other RNA
  misc_feature 1: note = ETL17 moiety with a phosphorothioate linkage
  modified_base 1: mod_base = OTHER; note = 2' O-methyl nucleoside
  modified_base 2: mod_base = OTHER; note = 2' O-methyl nucleoside
  modified_base 3: mod_base = OTHER; note = 2' O-methyl nucleoside
  modified_base 4: mod_base = OTHER; note = 2' O-methyl nucleoside
  modified_base 5: mod_base = OTHER; note = 2' fluoro-modified nucleoside
  modified_base 6: mod_base = OTHER; note = 2' O-methyl nucleoside
  modified_base 7: mod_base = OTHER; note = 2' O-methyl nucleoside
  modified_base 8: mod_base = OTHER; note = 2' fluoro-modified nucleoside
  modified_base 9: mod_base = OTHER; note = 2' fluoro-modified nucleoside
  modified_base 10: mod_base = OTHER; note = 2' fluoro-modified nucleoside
  modified_base 11: mod_base = OTHER; note = 2' fluoro-modified nucleoside
  modified_base 12: mod_base = OTHER; note = 2' O-methyl nucleoside
  modified_base 13: mod_base = OTHER; note = 2' O-methyl nucleoside
  modified_base 14: mod_base = OTHER; note = 2' O-methyl nucleoside
  modified_base 15: mod_base = OTHER; note = 2' O-methyl nucleoside
  modified_base 16: mod_base = OTHER; note = 2' O-methyl nucleoside
  modified_base 17: mod_base = OTHER; note = 2' O-methyl nucleoside
  modified_base 18: mod_base = OTHER; note = 2' O-methyl nucleoside
  modified_base 19: mod_base = OTHER; note = 2' O-methyl nucleoside with phosphorothioate linkage
  modified_base 20: mod_base = OTHER; note = 2' O-methyl nucleoside with phosphorothioate linkage
  modified_base 21: mod_base = OTHER; note = 2' O-methyl nucleoside
tgctaccagagacaactgatt

SEQ ID NO: 3815 - RNA, 21 nt, synthetic construct
  source 1..21: mol_type = other RNA
  misc_feature 1: note = ETL17 moiety with a phosphorothioate linkage
  modified_base 1: mod_base = OTHER; note = 2' O-methyl nucleoside
  modified_base 2: mod_base = OTHER; note = 2' O-methyl nucleoside
  modified_base 3: mod_base = OTHER; note = 2' O-methyl nucleoside
  modified_base 4: mod_base = OTHER; note = 2' O-methyl nucleoside
  modified_base 5: mod_base = OTHER; note = 2' fluoro-modified nucleoside
  modified_base 6: mod_base = OTHER; note = 2' O-methyl nucleoside
  modified_base 7: mod_base = OTHER; note = 2' fluoro-modified nucleoside
  modified_base 8: mod_base = OTHER; note = 2' fluoro-modified nucleoside
  modified_base 9: mod_base = OTHER; note = 2' fluoro-modified nucleoside
  modified_base 10: mod_base = OTHER; note = 2' fluoro-modified nucleoside
  modified_base 11: mod_base = OTHER; note = 2' O-methyl nucleoside
  modified_base 12: mod_base = OTHER; note = 2' O-methyl nucleoside
  modified_base 13: mod_base = OTHER; note = 2' O-methyl nucleoside
  modified_base 14: mod_base = OTHER; note = 2' O-methyl nucleoside
  modified_base 15: mod_base = OTHER; note = 2' O-methyl nucleoside
  modified_base 16: mod_base = OTHER; note = 2' O-methyl nucleoside
  modified_base 17: mod_base = OTHER; note = 2' O-methyl nucleoside
  modified_base 18: mod_base = OTHER; note = 2' O-methyl nucleoside
  modified_base 19: mod_base = OTHER; note = 2' O-methyl nucleoside with phosphorothioate linkage
  modified_base 20: mod_base = OTHER; note = 2' O-methyl nucleoside with phosphorothioate linkage
  modified_base 21: mod_base = OTHER; note = 2' O-methyl nucleoside
ttagatgaaagattcggtatt

SEQ ID NO: 3816 - RNA, 21 nt, synthetic construct
  source 1..21: mol_type = other RNA
  misc_feature 1: note = ETL17 moiety with a phosphorothioate linkage
  modified_base 1: mod_base = OTHER; note = 2' O-methyl nucleoside
  modified_base 2: mod_base = OTHER; note = 2' O-methyl nucleoside
  modified_base 3: mod_base = OTHER; note = 2' O-methyl nucleoside
  modified_base 4: mod_base = OTHER; note = 2' O-methyl nucleoside
  modified_base 5: mod_base = OTHER; note = 2' fluoro-modified nucleoside
  modified_base 6: mod_base = OTHER; note = 2' fluoro-modified nucleoside
  modified_base 7: mod_base = OTHER; note = 2' fluoro-modified nucleoside
  modified_base 8: mod_base = OTHER; note = 2' fluoro-modified nucleoside
  modified_base 9: mod_base = OTHER; note = 2' fluoro-modified nucleoside
  modified_base 10: mod_base = OTHER; note = 2' O-methyl nucleoside
  modified_base 11: mod_base = OTHER; note = 2' O-methyl nucleoside
  modified_base 12: mod_base = OTHER; note = 2' O-methyl nucleoside
  modified_base 13: mod_base = OTHER; note = 2' O-methyl nucleoside
  modified_base 14: mod_base = OTHER; note = 2' O-methyl nucleoside
  modified_base 15: mod_base = OTHER; note = 2' O-methyl nucleoside
  modified_base 16: mod_base = OTHER; note = 2' O-methyl nucleoside
  modified_base 17: mod_base = OTHER; note = 2' O-methyl nucleoside
  modified_base 18: mod_base = OTHER; note = 2' O-methyl nucleoside
  modified_base 19: mod_base = OTHER; note = 2' O-methyl nucleoside with phosphorothioate linkage
  modified_base 20: mod_base = OTHER; note = 2' O-methyl nucleoside with phosphorothioate linkage
  modified_base 21: mod_base = OTHER; note = 2' O-methyl nucleoside
gtctggaaatggatggacatt

SEQ ID NO: 3817 - RNA, 21 nt, synthetic construct
  source 1..21: mol_type = other RNA
  misc_feature 1: note = ETL17 moiety with a phosphorothioate linkage
  modified_base 1: mod_base = OTHER; note = 2' O-methyl nucleoside
  modified_base 2: mod_base = OTHER; note = 2' O-methyl nucleoside
  modified_base 3: mod_base = OTHER; note = 2' O-methyl nucleoside
  modified_base 4: mod_base = OTHER; note = 2' O-methyl nucleoside
  modified_base 5: mod_base = OTHER; note = 2' fluoro-modified nucleoside
  modified_base 6: mod_base = OTHER; note = 2' O-methyl nucleoside
  modified_base 7: mod_base = OTHER; note = 2' fluoro-modified nucleoside
  modified_base 8: mod_base = OTHER; note = 2' fluoro-modified nucleoside
  modified_base 9: mod_base = OTHER; note = 2' fluoro-modified nucleoside
  modified_base 10: mod_base = OTHER; note = 2' fluoro-modified nucleoside
  modified_base 11: mod_base = OTHER; note = 2' O-methyl nucleoside
  modified_base 12: mod_base = OTHER; note = 2' O-methyl nucleoside
  modified_base 13: mod_base = OTHER; note = 2' O-methyl nucleoside
  modified_base 14: mod_base = OTHER; note = 2' O-methyl nucleoside
  modified_base 15: mod_base = OTHER; note = 2' O-methyl nucleoside
  modified_base 16: mod_base = OTHER; note = 2' O-methyl nucleoside
  modified_base 17: mod_base = OTHER; note = 2' O-methyl nucleoside
  modified_base 18: mod_base = OTHER; note = 2' O-methyl nucleoside
  modified_base 19: mod_base = OTHER; note = 2' O-methyl nucleoside with phosphorothioate linkage
  modified_base 20: mod_base = OTHER; note = 2' O-methyl nucleoside with phosphorothioate linkage
  modified_base 21: mod_base = OTHER; note = 2' O-methyl nucleoside
tctgtctcctactggcacatt

SEQ ID NO: 3818 - RNA, 21 nt, synthetic construct
  source 1..21: mol_type = other RNA
  misc_feature 1: note = ETL17 moiety with a phosphorothioate linkage
  modified_base 1: mod_base = OTHER; note = 2' O-methyl nucleoside
  modified_base 2: mod_base = OTHER; note = 2' O-methyl nucleoside
  modified_base 3: mod_base = OTHER; note = 2' O-methyl nucleoside
  modified_base 4: mod_base = OTHER; note = 2' O-methyl nucleoside
  modified_base 5: mod_base = OTHER; note = 2' fluoro-modified nucleoside
  modified_base 6: mod_base = OTHER; note = 2' O-methyl nucleoside
  modified_base 7: mod_base = OTHER; note = 2' O-methyl nucleoside
  modified_base 8: mod_base = OTHER; note = 2' fluoro-modified nucleoside
  modified_base 9: mod_base = OTHER; note = 2' fluoro-modified nucleoside
  modified_base 10: mod_base = OTHER; note = 2' O-methyl nucleoside
  modified_base 11: mod_base = OTHER; note = 2' fluoro-modified nucleoside
  modified_base 12: mod_base = OTHER; note = 2' O-methyl nucleoside
  modified_base 13: mod_base = OTHER; note = 2' O-methyl nucleoside
  modified_base 14: mod_base = OTHER; note = 2' O-methyl nucleoside
  modified_base 15: mod_base = OTHER; note = 2' O-methyl nucleoside
  modified_base 16: mod_base = OTHER; note = 2' O-methyl nucleoside
  modified_base 17: mod_base = OTHER; note = 2' O-methyl nucleoside
  modified_base 18: mod_base = OTHER; note = 2' O-methyl nucleoside
  modified_base 19: mod_base = OTHER; note = 2' O-methyl nucleoside with phosphorothioate linkage
  modified_base 20: mod_base = OTHER; note = 2' O-methyl nucleoside with phosphorothioate linkage
  modified_base 21: mod_base = OTHER; note = 2' O-methyl nucleoside
tcctactggcacaacagaatt

SEQ ID NO: 3819 - DNA, 21 bp, synthetic construct
  source 1..21: mol_type = other DNA
  misc_feature 1: note = ETL17 moiety with a phosphorothioate linkage
  modified_base 1: mod_base = OTHER; note = 2' O-methyl nucleoside
  modified_base 2: mod_base = OTHER; note = 2' O-methyl nucleoside
  modified_base 3: mod_base = OTHER; note = 2' O-methyl nucleoside
  modified_base 4: mod_base = OTHER; note = 2' O-methyl nucleoside
  modified_base 5: mod_base = OTHER; note = 2' fluoro-modified nucleoside
  modified_base 6: mod_base = OTHER; note = 2' O-methyl nucleoside
  modified_base 7: mod_base = OTHER; note = 2' fluoro-modified nucleoside
  modified_base 8: mod_base = OTHER; note = 2' fluoro-modified nucleoside
  modified_base 9: mod_base = OTHER; note = 2' fluoro-modified nucleoside
  modified_base 11: mod_base = OTHER; note = 2' O-methyl nucleoside
  modified_base 12: mod_base = OTHER; note = 2' O-methyl nucleoside
  modified_base 13: mod_base = OTHER; note = 2' O-methyl nucleoside
  modified_base 14: mod_base = OTHER; note = 2' O-methyl nucleoside
  modified_base 15: mod_base = OTHER; note = 2' O-methyl nucleoside
  modified_base 16: mod_base = OTHER; note = 2' O-methyl nucleoside
  modified_base 17: mod_base = OTHER; note = 2' O-methyl nucleoside
  modified_base 18: mod_base = OTHER; note = 2' O-methyl nucleoside
  modified_base 19: mod_base = OTHER; note = 2' O-methyl nucleoside with phosphorothioate linkage
  modified_base 20: mod_base = OTHER; note = 2' O-methyl nucleoside with phosphorothioate linkage
  modified_base 21: mod_base = OTHER; note = 2' O-methyl nucleoside
  misc_feature 1..9: note = RNA
  misc_feature 10: note = DNA
  misc_feature 11..21: note = RNA
ctgggaaatgagaagattatt

SEQ ID NO: 3820 - RNA, 21 nt, synthetic construct
  source 1..21: mol_type = other RNA
  misc_feature 1: note = ETL17 moiety with a phosphorothioate linkage
  modified_base 1: mod_base = OTHER; note = 2' O-methyl nucleoside
  modified_base 2: mod_base = OTHER; note = 2' O-methyl nucleoside
  modified_base 3: mod_base = OTHER; note = 2' O-methyl nucleoside
  modified_base 4: mod_base = OTHER; note = 2' O-methyl nucleoside
  modified_base 5: mod_base = OTHER; note = 2' fluoro-modified nucleoside
  modified_base 6: mod_base = OTHER; note = 2' fluoro-modified nucleoside
  modified_base 7: mod_base = OTHER; note = 2' O-methyl nucleoside
  modified_base 8: mod_base = OTHER; note = 2' fluoro-modified nucleoside
  modified_base 9: mod_base = OTHER; note = 2' fluoro-modified nucleoside
  modified_base 10: mod_base = OTHER; note = 2' O-methyl nucleoside
  modified_base 11: mod_base = OTHER; note = 2' fluoro-modified nucleoside
  modified_base 12: mod_base = OTHER; note = 2' O-methyl nucleoside
  modified_base 13: mod_base = OTHER; note = 2' O-methyl nucleoside
  modified_base 14: mod_base = OTHER; note = 2' O-methyl nucleoside
  modified_base 15: mod_base = OTHER; note = 2' O-methyl nucleoside
  modified_base 16: mod_base = OTHER; note = 2' O-methyl nucleoside
  modified_base 17: mod_base = OTHER; note = 2' O-methyl nucleoside
  modified_base 18: mod_base = OTHER; note = 2' O-methyl nucleoside
  modified_base 19: mod_base = OTHER; note = 2' O-methyl nucleoside with phosphorothioate linkage
  modified_base 20: mod_base = OTHER; note = 2' O-methyl nucleoside with phosphorothioate linkage
  modified_base 21: mod_base = OTHER; note = 2' O-methyl nucleoside
gggaaatgagaagattcaatt

SEQ ID NO: 3821 - DNA, 21 bp, synthetic construct
  source 1..21: mol_type = other DNA
  misc_feature 1: note = ETL17 moiety with a phosphorothioate linkage
  modified_base 1: mod_base = OTHER; note = 2' O-methyl nucleoside
  modified_base 2: mod_base = OTHER; note = 2' O-methyl nucleoside
  modified_base 3: mod_base = OTHER; note = 2' O-methyl nucleoside
  modified_base 4: mod_base = OTHER; note = 2' O-methyl nucleoside
  modified_base 5: mod_base = OTHER; note = 2' fluoro-modified nucleoside
  modified_base 6: mod_base = OTHER; note = 2' O-methyl nucleoside
  modified_base 7: mod_base = OTHER; note = 2' fluoro-modified nucleoside
  modified_base 8: mod_base = OTHER; note = 2' fluoro-modified nucleoside
  modified_base 9: mod_base = OTHER; note = 2' fluoro-modified nucleoside
  modified_base 11: mod_base = OTHER; note = 2' O-methyl nucleoside
  modified_base 12: mod_base = OTHER; note = 2' O-methyl nucleoside
  modified_base 13: mod_base = OTHER; note = 2' O-methyl nucleoside
  modified_base 14: mod_base = OTHER; note = 2' O-methyl nucleoside
  modified_base 15: mod_base = OTHER; note = 2' O-methyl nucleoside
  modified_base 16: mod_base = OTHER; note = 2' O-methyl nucleoside
  modified_base 17: mod_base = OTHER; note = 2' O-methyl nucleoside
  modified_base 18: mod_base = OTHER; note = 2' O-methyl nucleoside
  modified_base 19: mod_base = OTHER; note = 2' O-methyl nucleoside with phosphorothioate linkage
  modified_base 20: mod_base = OTHER; note = 2' O-methyl nucleoside with phosphorothioate linkage
  modified_base 21: mod_base = OTHER; note = 2' O-methyl nucleoside
  misc_feature 1..9: note = RNA
  misc_feature 10: note = DNA
  misc_feature 11..21: note = RNA
tgagaagattcatttgatatt

SEQ ID NO: 3822 - DNA, 21 bp, synthetic construct
  source 1..21: mol_type = other DNA
  misc_feature 1: note = ETL17 moiety with a phosphorothioate linkage
  modified_base 1: mod_base = OTHER; note = 2' O-methyl nucleoside
  modified_base 2: mod_base = OTHER; note = 2' O-methyl nucleoside
  modified_base 3: mod_base = OTHER; note = 2' O-methyl nucleoside
  modified_base 4: mod_base = OTHER; note = 2' O-methyl nucleoside
  modified_base 5: mod_base = OTHER; note = 2' fluoro-modified nucleoside
  modified_base 6: mod_base = OTHER; note = 2' O-methyl nucleoside
  modified_base 7: mod_base = OTHER; note = 2' fluoro-modified nucleoside
  modified_base 8: mod_base = OTHER; note = 2' fluoro-modified nucleoside
  modified_base 9: mod_base = OTHER; note = 2' fluoro-modified nucleoside
  modified_base 11: mod_base = OTHER; note = 2' O-methyl nucleoside
  modified_base 12: mod_base = OTHER; note = 2' O-methyl nucleoside
  modified_base 13: mod_base = OTHER; note = 2' O-methyl nucleoside
  modified_base 14: mod_base = OTHER; note = 2' O-methyl nucleoside
  modified_base 15: mod_base = OTHER; note = 2' O-methyl nucleoside
  modified_base 16: mod_base = OTHER; note = 2' O-methyl nucleoside
  modified_base 17: mod_base = OTHER; note = 2' O-methyl nucleoside
  modified_base 18: mod_base = OTHER; note = 2' O-methyl nucleoside
  modified_base 19: mod_base = OTHER; note = 2' O-methyl nucleoside with phosphorothioate linkage
  modified_base 20: mod_base = OTHER; note = 2' O-methyl nucleoside with phosphorothioate linkage
  modified_base 21: mod_base = OTHER; note = 2' O-methyl nucleoside
  misc_feature 1..9: note = RNA
  misc_feature 10: note = DNA
  misc_feature 11..21: note = RNA
gagaagattcatttgataatt

SEQ ID NO: 3823 - RNA, 21 nt, synthetic construct
  source 1..21: mol_type = other RNA
  misc_feature 1: note = ETL17 moiety with a phosphorothioate linkage
  modified_base 1: mod_base = OTHER; note = 2' O-methyl nucleoside
  modified_base 2: mod_base = OTHER; note = 2' O-methyl nucleoside
  modified_base 3: mod_base = OTHER; note = 2' O-methyl nucleoside
  modified_base 4: mod_base = OTHER; note = 2' O-methyl nucleoside
  modified_base 5: mod_base = OTHER; note = 2' fluoro-modified nucleoside
  modified_base 6: mod_base = OTHER; note = 2' O-methyl nucleoside
  modified_base 7: mod_base = OTHER; note = 2' fluoro-modified nucleoside
  modified_base 8: mod_base = OTHER; note = 2' O-methyl nucleoside
  modified_base 9: mod_base = OTHER; note = 2' fluoro-modified nucleoside
  modified_base 10: mod_base = OTHER; note = 2' fluoro-modified nucleoside
  modified_base 11: mod_base = OTHER; note = 2' O-methyl nucleoside
  modified_base 12: mod_base = OTHER; note = 2' O-methyl nucleoside
  modified_base 13: mod_base = OTHER; note = 2' O-methyl nucleoside
  modified_base 14: mod_base = OTHER; note = 2' O-methyl nucleoside
  modified_base 15: mod_base = OTHER; note = 2' O-methyl nucleoside
  modified_base 16: mod_base = OTHER; note = 2' O-methyl nucleoside
  modified_base 17: mod_base = OTHER; note = 2' O-methyl nucleoside
  modified_base 18: mod_base = OTHER; note = 2' O-methyl nucleoside
  modified_base 19: mod_base = OTHER; note = 2' O-methyl nucleoside with phosphorothioate linkage
  modified_base 20: mod_base = OTHER; note = 2' O-methyl nucleoside with phosphorothioate linkage
  modified_base 21: mod_base = OTHER; note = 2' O-methyl nucleoside
tggcatgcagttcagtacatt

SEQ ID NO: 3824 - RNA, 21 nt, synthetic construct
  source 1..21: mol_type = other RNA
  misc_feature 1: note = ETL17 moiety with a phosphorothioate linkage
  modified_base 1: mod_base = OTHER; note = 2' O-methyl nucleoside
  modified_base 2: mod_base = OTHER; note = 2' O-methyl nucleoside
  modified_base 3: mod_base = OTHER; note = 2' O-methyl nucleoside
  modified_base 4: mod_base = OTHER; note = 2' O-methyl nucleoside
  modified_base 5: mod_base = OTHER; note = 2' fluoro-modified nucleoside
  modified_base 6: mod_base = OTHER; note = 2' O-methyl nucleoside
  modified_base 7: mod_base = OTHER; note = 2' O-methyl nucleoside
  modified_base 8: mod_base = OTHER; note = 2' fluoro-modified nucleoside
  modified_base 9: mod_base = OTHER; note = 2' fluoro-modified nucleoside
  modified_base 10: mod_base = OTHER; note = 2' O-methyl nucleoside
  modified_base 11: mod_base = OTHER; note = 2' O-methyl nucleoside
  modified_base 12: mod_base = OTHER; note = 2' O-methyl nucleoside
  modified_base 13: mod_base = OTHER; note = 2' O-methyl nucleoside
  modified_base 14: mod_base = OTHER; note = 2' O-methyl nucleoside
  modified_base 15: mod_base = OTHER; note = 2' O-methyl nucleoside
  modified_base 16: mod_base = OTHER; note = 2' O-methyl nucleoside
  modified_base 17: mod_base = OTHER; note = 2' O-methyl nucleoside
  modified_base 18: mod_base = OTHER; note = 2' O-methyl nucleoside
  modified_base 19: mod_base = OTHER; note = 2' O-methyl nucleoside with phosphorothioate linkage
  modified_base 20: mod_base = OTHER; note = 2' O-methyl nucleoside with phosphorothioate linkage
  modified_base 21: mod_base = OTHER; note = 2' O-methyl nucleoside
catgcagttcagtacctgatt

SEQ ID NO: 3825 - RNA, 21 nt, synthetic construct
  source 1..21: mol_type = other RNA
  misc_feature 1: note = ETL17 moiety with a phosphorothioate linkage
  modified_base 1: mod_base = OTHER; note = 2' O-methyl nucleoside
  modified_base 2: mod_base = OTHER; note = 2' O-methyl nucleoside
  modified_base 3: mod_base = OTHER; note = 2' O-methyl nucleoside
  modified_base 4: mod_base = OTHER; note = 2' O-methyl nucleoside
  modified_base 5: mod_base = OTHER; note = 2' fluoro-modified nucleoside
  modified_base 6: mod_base = OTHER; note = 2' O-methyl nucleoside
  modified_base 7: mod_base = OTHER; note = 2' O-methyl nucleoside
  modified_base 8: mod_base = OTHER; note = 2' O-methyl nucleoside
  modified_base 9: mod_base = OTHER; note = 2' fluoro-modified nucleoside
  modified_base 10: mod_base = OTHER; note = 2' fluoro-modified nucleoside
  modified_base 11: mod_base = OTHER; note = 2' O-methyl nucleoside
  modified_base 12: mod_base = OTHER; note = 2' O-methyl nucleoside
  modified_base 13: mod_base = OTHER; note = 2' O-methyl nucleoside
  modified_base 14: mod_base = OTHER; note = 2' O-methyl nucleoside
  modified_base 15: mod_base = OTHER; note = 2' O-methyl nucleoside
  modified_base 16: mod_base = OTHER; note = 2' O-methyl nucleoside
  modified_base 17: mod_base = OTHER; note = 2' O-methyl nucleoside
  modified_base 18: mod_base = OTHER; note = 2' O-methyl nucleoside
  modified_base 19: mod_base = OTHER; note = 2' O-methyl nucleoside with phosphorothioate linkage
  modified_base 20: mod_base = OTHER; note = 2' O-methyl nucleoside with phosphorothioate linkage
  modified_base 21: mod_base = OTHER; note = 2' O-methyl nucleoside
tgcagttcagtacctgggatt

SEQ ID NO: 3826 - RNA, 21 nt, synthetic construct
  source 1..21: mol_type = other RNA
  misc_feature 1: note = ETL17 moiety with a phosphorothioate linkage
  modified_base 1: mod_base = OTHER; note = 2' O-methyl nucleoside
  modified_base 2: mod_base = OTHER; note = 2' O-methyl nucleoside
  modified_base 3: mod_base = OTHER; note = 2' O-methyl nucleoside
  modified_base 4: mod_base = OTHER; note = 2' O-methyl nucleoside
  modified_base 5: mod_base = OTHER; note = 2' fluoro-modified nucleoside
  modified_base 6: mod_base = OTHER; note = 2' fluoro-modified nucleoside
  modified_base 7: mod_base = OTHER; note = 2' O-methyl nucleoside
  modified_base 8: mod_base = OTHER; note = 2' O-methyl nucleoside
  modified_base 9: mod_base = OTHER; note = 2' fluoro-modified nucleoside
  modified_base 10: mod_base = OTHER; note = 2' O-methyl nucleoside
  modified_base 11: mod_base = OTHER; note = 2' fluoro-modified nucleoside
  modified_base 12: mod_base = OTHER; note = 2' O-methyl nucleoside
  modified_base 13: mod_base = OTHER; note = 2' O-methyl nucleoside
  modified_base 14: mod_base = OTHER; note = 2' O-methyl nucleoside
  modified_base 15: mod_base = OTHER; note = 2' O-methyl nucleoside
  modified_base 16: mod_base = OTHER; note = 2' O-methyl nucleoside
  modified_base 17: mod_base = OTHER; note = 2' O-methyl nucleoside
  modified_base 18: mod_base = OTHER; note = 2' O-methyl nucleoside
  modified_base 19: mod_base = OTHER; note = 2' O-methyl nucleoside with phosphorothioate linkage
  modified_base 20: mod_base = OTHER; note = 2' O-methyl nucleoside with phosphorothioate linkage
  modified_base 21: mod_base = OTHER; note = 2' O-methyl nucleoside
cagttcagtacctgggacatt

SEQ ID NO: 3827 - RNA, 21 nt, synthetic construct
  source 1..21: mol_type = other RNA
  misc_feature 1: note = ETL17 moiety with a phosphorothioate linkage
  modified_base 1: mod_base = OTHER; note = 2' O-methyl nucleoside
  modified_base 2: mod_base = OTHER; note = 2' O-methyl nucleoside
  modified_base 3: mod_base = OTHER; note = 2' O-methyl nucleoside
  modified_base 4: mod_base = OTHER; note = 2' O-methyl nucleoside
  modified_base 5: mod_base = OTHER; note = 2' O-methyl nucleoside
  modified_base 6: mod_base = OTHER; note = 2' fluoro-modified nucleoside
  modified_base 7: mod_base = OTHER; note = 2' fluoro-modified nucleoside
  modified_base 8: mod_base = OTHER; note = 2' O-methyl nucleoside
  modified_base 9: mod_base = OTHER; note = 2' fluoro-modified nucleoside
  modified_base 10: mod_base = OTHER; note = 2' O-methyl nucleoside
  modified_base 11: mod_base = OTHER; note = 2' O-methyl nucleoside
  modified_base 12: mod_base = OTHER; note = 2' O-methyl nucleoside
  modified_base 13: mod_base = OTHER; note = 2' O-methyl nucleoside
  modified_base 14: mod_base = OTHER; note = 2' O-methyl nucleoside
  modified_base 15: mod_base = OTHER; note = 2' O-methyl nucleoside
  modified_base 16: mod_base = OTHER; note = 2' O-methyl nucleoside
  modified_base 17: mod_base = OTHER; note = 2' O-methyl nucleoside
  modified_base 18: mod_base = OTHER; note = 2' O-methyl nucleoside
  modified_base 19: mod_base = OTHER; note = 2' O-methyl nucleoside with phosphorothioate linkage
  modified_base 20: mod_base = OTHER; note = 2' O-methyl nucleoside with phosphorothioate linkage
  modified_base 21: mod_base = OTHER; note = 2' O-methyl nucleoside
agttcagtacctgggacaatt

SEQ ID NO: 3828 - RNA, 21 nt, synthetic construct
  source 1..21: mol_type = other RNA
  misc_feature 1: note = ETL17 moiety with a phosphorothioate linkage
  modified_base 1: mod_base = OTHER; note = 2' O-methyl nucleoside
  modified_base 2: mod_base = OTHER; note = 2' O-methyl nucleoside
  modified_base 3: mod_base = OTHER; note = 2' O-methyl nucleoside
  modified_base 4: mod_base = OTHER; note = 2' O-methyl nucleoside
  modified_base 5: mod_base = OTHER; note = 2' O-methyl nucleoside
  modified_base 6: mod_base = OTHER; note = 2' fluoro-modified nucleoside
  modified_base 7: mod_base = OTHER; note = 2' fluoro-modified nucleoside
  modified_base 8: mod_base = OTHER; note = 2' fluoro-modified nucleoside
  modified_base 9: mod_base = OTHER; note = 2' fluoro-modified nucleoside
  modified_base 10: mod_base = OTHER; note = 2' O-methyl nucleoside
  modified_base 11: mod_base = OTHER; note = 2' fluoro-modified nucleoside
  modified_base 12: mod_base = OTHER; note = 2' O-methyl nucleoside
  modified_base 13: mod_base = OTHER; note = 2' O-methyl nucleoside
  modified_base 14: mod_base = OTHER; note = 2' O-methyl nucleoside
  modified_base 15: mod_base = OTHER; note = 2' O-methyl nucleoside
  modified_base 16: mod_base = OTHER; note = 2' O-methyl nucleoside
  modified_base 17: mod_base = OTHER; note = 2' O-methyl nucleoside
  modified_base 18: mod_base = OTHER; note = 2' O-methyl nucleoside
  modified_base 19: mod_base = OTHER; note = 2' O-methyl nucleoside with phosphorothioate linkage
  modified_base 20: mod_base = OTHER; note = 2' O-methyl nucleoside with phosphorothioate linkage
  modified_base 21: mod_base = OTHER; note = 2' O-methyl nucleoside
tacctgggacaatgacaaatt

SEQ ID NO: 3829 - RNA, 21 nt, synthetic construct
  source 1..21: mol_type = other RNA
  misc_feature 1: note = ETL17 moiety with a phosphorothioate linkage
  modified_base 1: mod_base = OTHER; note = 2' O-methyl nucleoside
  modified_base 2: mod_base = OTHER; note = 2' O-methyl nucleoside
  modified_base 3: mod_base = OTHER; note = 2' O-methyl nucleoside
  modified_base 4: mod_base = OTHER; note = 2' O-methyl nucleoside
  modified_base 5: mod_base = OTHER; note = 2' fluoro-modified nucleoside
  modified_base 6: mod_base = OTHER; note = 2' fluoro-modified nucleoside
  modified_base 7: mod_base = OTHER; note = 2' O-methyl nucleoside
  modified_base 8: mod_base = OTHER; note = 2' fluoro-modified nucleoside
  modified_base 9: mod_base = OTHER; note = 2' fluoro-modified nucleoside
  modified_base 10: mod_base = OTHER; note = 2' O-methyl nucleoside
  modified_base 11: mod_base = OTHER; note = 2' fluoro-modified nucleoside
  modified_base 12: mod_base = OTHER; note = 2' O-methyl nucleoside
  modified_base 13: mod_base = OTHER; note = 2' O-methyl nucleoside
  modified_base 14: mod_base = OTHER; note = 2' O-methyl nucleoside
  modified_base 15: mod_base = OTHER; note = 2' O-methyl nucleoside
  modified_base 16: mod_base = OTHER; note = 2' O-methyl nucleoside
  modified_base 17: mod_base = OTHER; note = 2' O-methyl nucleoside
  modified_base 18: mod_base = OTHER; note = 2' O-methyl nucleoside
  modified_base 19: mod_base = OTHER; note = 2' O-methyl nucleoside with phosphorothioate linkage
  modified_base 20: mod_base = OTHER; note = 2' O-methyl nucleoside with phosphorothioate linkage
  modified_base 21: mod_base = OTHER; note = 2' O-methyl nucleoside
tgacaatgataagtttgaatt

SEQ ID NO: 3830 - RNA, 21 nt, synthetic construct
  source 1..21: mol_type = other RNA
  misc_feature 1: note = ETL17 moiety with a phosphorothioate linkage
  modified_base 1: mod_base = OTHER; note = 2' O-methyl nucleoside
  modified_base 2: mod_base = OTHER; note = 2' O-methyl nucleoside
  modified_base 3: mod_base = OTHER; note = 2' O-methyl nucleoside
  modified_base 4: mod_base = OTHER; note = 2' O-methyl nucleoside
  modified_base 5: mod_base = OTHER; note = 2' O-methyl nucleoside
  modified_base 6: mod_base = OTHER; note = 2' O-methyl nucleoside
  modified_base 7: mod_base = OTHER; note = 2' fluoro-modified nucleoside
  modified_base 8: mod_base = OTHER; note = 2' fluoro-modified nucleoside
  modified_base 9: mod_base = OTHER; note = 2' fluoro-modified nucleoside
  modified_base 10: mod_base = OTHER; note = 2' fluoro-modified nucleoside
  modified_base 11: mod_base = OTHER; note = 2' O-methyl nucleoside
  modified_base 12: mod_base = OTHER; note = 2' O-methyl nucleoside
  modified_base 13: mod_base = OTHER; note = 2' O-methyl nucleoside
  modified_base 14: mod_base = OTHER; note = 2' O-methyl nucleoside
  modified_base 15: mod_base = OTHER; note = 2' O-methyl nucleoside
  modified_base 16: mod_base = OTHER; note = 2' O-methyl nucleoside
  modified_base 17: mod_base = OTHER; note = 2' O-methyl nucleoside
  modified_base 18: mod_base = OTHER; note = 2' O-methyl nucleoside
  modified_base 19: mod_base = OTHER; note = 2' O-methyl nucleoside with phosphorothioate linkage
  modified_base 20: mod_base = OTHER; note = 2' O-methyl nucleoside with phosphorothioate linkage
  modified_base 21: mod_base = OTHER; note = 2' O-methyl nucleoside
aagtttgaaggcaactgtatt

SEQ ID NO: 3831 - RNA, 21 nt, synthetic construct
  source 1..21: mol_type = other RNA
  misc_feature 1: note = ETL17 moiety with a phosphorothioate linkage
  modified_base 1: mod_base = OTHER; note = 2' O-methyl nucleoside
  modified_base 2: mod_base = OTHER; note = 2' O-methyl nucleoside
  modified_base 3: mod_base = OTHER; note = 2' O-methyl nucleoside
  modified_base 4: mod_base = OTHER; note = 2' O-methyl nucleoside
  modified_base 5: mod_base = OTHER; note = 2' fluoro-modified nucleoside
  modified_base 6: mod_base = OTHER; note = 2' O-methyl nucleoside
  modified_base 7: mod_base = OTHER; note = 2' fluoro-modified nucleoside
  modified_base 8: mod_base = OTHER; note = 2' O-methyl nucleoside
  modified_base 9: mod_base = OTHER; note = 2' fluoro-modified nucleoside
  modified_base 10: mod_base = OTHER; note = 2' O-methyl nucleoside
  modified_base 11: mod_base = OTHER; note = 2' O-methyl nucleoside
  modified_base 12: mod_base = OTHER; note = 2' O-methyl nucleoside
  modified_base 13: mod_base = OTHER; note = 2' O-methyl nucleoside
  modified_base 14: mod_base = OTHER; note = 2' O-methyl nucleoside
  modified_base 15: mod_base = OTHER; note = 2' O-methyl nucleoside
  modified_base 16: mod_base = OTHER; note = 2' O-methyl nucleoside
  modified_base 17: mod_base = OTHER; note = 2' O-methyl nucleoside
  modified_base 18: mod_base = OTHER; note = 2' O-methyl nucleoside
  modified_base 19: mod_base = OTHER; note = 2' O-methyl nucleoside with phosphorothioate linkage
  modified_base 20: mod_base = OTHER; note = 2' O-methyl nucleoside with phosphorothioate linkage
  modified_base 21: mod_base = OTHER; note = 2' O-methyl nucleoside
cacttactcaaaagcatcatt

SEQ ID NO: 3832 - RNA, 21 nt, synthetic construct
  source 1..21: mol_type = other RNA
  misc_feature 1: note = ETL17 moiety with a phosphorothioate linkage
  modified_base 1: mod_base = OTHER; note = 2' O-methyl nucleoside
  modified_base 2: mod_base = OTHER; note = 2' O-methyl nucleoside
  modified_base 3: mod_base = OTHER; note = 2' O-methyl nucleoside
  modified_base 4: mod_base = OTHER; note = 2' O-methyl nucleoside
  modified_base 5: mod_base = OTHER; note = 2' fluoro-modified nucleoside
  modified_base 6: mod_base = OTHER; note = 2' O-methyl nucleoside
  modified_base 7: mod_base = OTHER; note = 2' fluoro-modified nucleoside
  modified_base 8: mod_base = OTHER; note = 2' O-methyl nucleoside
  modified_base 9: mod_base = OTHER; note = 2' fluoro-modified nucleoside
  modified_base 10: mod_base = OTHER; note = 2' fluoro-modified nucleoside
  modified_base 11: mod_base = OTHER; note = 2' O-methyl nucleoside
  modified_base 12: mod_base = OTHER; note = 2' O-methyl nucleoside
  modified_base 13: mod_base = OTHER; note = 2' O-methyl nucleoside
  modified_base 14: mod_base = OTHER; note = 2' O-methyl nucleoside
  modified_base 15: mod_base = OTHER; note = 2' O-methyl nucleoside
  modified_base 16: mod_base = OTHER; note = 2' O-methyl nucleoside
  modified_base 17: mod_base = OTHER; note = 2' O-methyl nucleoside
  modified_base 18: mod_base = OTHER; note = 2' O-methyl nucleoside
  modified_base 19: mod_base = OTHER; note = 2' O-methyl nucleoside with phosphorothioate linkage
  modified_base 20: mod_base = OTHER; note = 2' O-methyl nucleoside with phosphorothioate linkage
  modified_base 21: mod_base = OTHER; note = 2' O-methyl nucleoside
catctactcctaatggttatt

SEQ ID NO: 3833 - RNA, 21 nt, synthetic construct
  source 1..21: mol_type = other RNA
  misc_feature 1: note = ETL17 moiety with a phosphorothioate linkage
  modified_base 1: mod_base = OTHER; note = 2' O-methyl nucleoside
  modified_base 2: mod_base = OTHER; note = 2' O-methyl nucleoside
  modified_base 3: mod_base = OTHER; note = 2' O-methyl nucleoside
  modified_base 4: mod_base = OTHER; note = 2' methoxy ethyl nucleoside
  modified_base 5: mod_base = OTHER; note = 2' O-methyl nucleoside
  modified_base 6: mod_base = OTHER; note = 2' fluoro-modified nucleoside
  modified_base 7: mod_base = OTHER; note = 2' fluoro-modified nucleoside
  modified_base 8: mod_base = OTHER; note = 2' fluoro-modified nucleoside
  modified_base 9: mod_base = OTHER; note = 2' fluoro-modified nucleoside
  modified_base 10: mod_base = OTHER; note = 2' O-methyl nucleoside
  modified_base 11: mod_base = OTHER; note = 2' O-methyl nucleoside
  modified_base 12: mod_base = OTHER; note = 2' methoxy ethyl nucleoside
  modified_base 13: mod_base = OTHER; note = 2' O-methyl nucleoside
  modified_base 14: mod_base = OTHER; note = 2' O-methyl nucleoside
  modified_base 15: mod_base = OTHER; note = 2' O-methyl nucleoside
  modified_base 16: mod_base = OTHER; note = 2' O-methyl nucleoside
  modified_base 17: mod_base = OTHER; note = 2' O-methyl nucleoside
  modified_base 18: mod_base = OTHER; note = 2' O-methyl nucleoside
  modified_base 19: mod_base = OTHER; note = 2' O-methyl nucleoside with phosphorothioate linkage
  modified_base 20: mod_base = OTHER; note = 2' O-methyl nucleoside with phosphorothioate linkage
  modified_base 21: mod_base = OTHER; note = 2' O-methyl nucleoside
cagacatcatgagttggtatt

SEQ ID NO: 3834 - RNA, 21 nt, synthetic construct
  source 1..21: mol_type = other RNA
  misc_feature 1: note = ETL17 moiety with a phosphorothioate linkage
  modified_base 1: mod_base = OTHER; note = 2' O-methyl nucleoside
  modified_base 2: mod_base = OTHER; note = 2' O-methyl nucleoside
  modified_base 3: mod_base = OTHER; note = 2' O-methyl nucleoside
  modified_base 4: mod_base = OTHER; note = 2' methoxy ethyl nucleoside
  modified_base 5: mod_base = OTHER; note = 2' O-methyl nucleoside
  modified_base 6: mod_base = OTHER; note = 2' fluoro-modified nucleoside
  modified_base 7: mod_base = OTHER; note = 2' fluoro-modified nucleoside
  modified_base 8: mod_base = OTHER; note = 2' fluoro-modified nucleoside
  modified_base 9: mod_base = OTHER; note = 2' fluoro-modified nucleoside
  modified_base 10: mod_base = OTHER; note = 2' O-methyl nucleoside
  modified_base 11: mod_base = OTHER; note = 2' O-methyl nucleoside
  modified_base 12: mod_base = OTHER; note = 2' O-methyl nucleoside
  modified_base 13: mod_base = OTHER; note = 2' methoxy ethyl nucleoside
  modified_base 14: mod_base = OTHER; note = 2' O-methyl nucleoside
  modified_base 15: mod_base = OTHER; note = 2' O-methyl nucleoside
  modified_base 16: mod_base = OTHER; note = 2' O-methyl nucleoside
  modified_base 17: mod_base = OTHER; note = 2' O-methyl nucleoside
  modified_base 18: mod_base = OTHER; note = 2' O-methyl nucleoside
  modified_base 19: mod_base = OTHER; note = 2' O-methyl nucleoside with phosphorothioate linkage
  modified_base 20: mod_base = OTHER; note = 2' O-methyl nucleoside with phosphorothioate linkage
  modified_base 21: mod_base = OTHER; note = 2' O-methyl nucleoside
cagacatcatgagttggtatt

SEQ ID NO: 3835 - RNA, 21 nt, synthetic construct
  source 1..21: mol_type = other RNA
  misc_feature 1: note = ETL17 moiety with a phosphorothioate linkage
  modified_base 1: mod_base = OTHER; note = 2' O-methyl nucleoside
  modified_base 2: mod_base = OTHER; note = 2' O-methyl nucleoside
  modified_base 3: mod_base = OTHER; note = 2' O-methyl nucleoside
  modified_base 4: mod_base = OTHER; note = 2' methoxy ethyl nucleoside
  modified_base 5: mod_base = OTHER; note = 2' O-methyl nucleoside
  modified_base 6: mod_base = OTHER; note = 2' fluoro-modified nucleoside
  modified_base 7: mod_base = OTHER; note = 2' fluoro-modified nucleoside
  modified_base 8: mod_base = OTHER; note = 2' fluoro-modified nucleoside
  modified_base 9: mod_base = OTHER; note = 2' fluoro-modified nucleoside
  modified_base 10: mod_base = OTHER; note = 2' O-methyl nucleoside
  modified_base 11: mod_base = OTHER; note = 2' O-methyl nucleoside
  modified_base 12: mod_base = OTHER; note = 2' O-methyl nucleoside
  modified_base 13: mod_base = OTHER; note = 2' O-methyl nucleoside
  modified_base 14: mod_base = OTHER; note = 2' methoxy ethyl thymine
  modified_base 15: mod_base = OTHER; note = 2' O-methyl nucleoside
  modified_base 16: mod_base = OTHER; note = 2' O-methyl nucleoside
  modified_base 17: mod_base = OTHER; note = 2' O-methyl nucleoside
  modified_base 18: mod_base = OTHER; note = 2' O-methyl nucleoside
  modified_base 19: mod_base = OTHER; note = 2' O-methyl nucleoside with phosphorothioate linkage
  modified_base 20: mod_base = OTHER; note = 2' O-methyl nucleoside with phosphorothioate linkage
  modified_base 21: mod_base = OTHER; note = 2' O-methyl nucleoside
cagacatcatgagttggtatt

SEQ ID NO: 3836 - RNA, 21 nt, synthetic construct
  source 1..21: mol_type = other RNA
  misc_feature 1: note = ETL17 moiety with a phosphorothioate linkage
  modified_base 1: mod_base = OTHER; note = 2' O-methyl nucleoside
  modified_base 2: mod_base = OTHER; note = 2' O-methyl nucleoside
  modified_base 3: mod_base = OTHER; note = 2' O-methyl nucleoside
  modified_base 4: mod_base = OTHER; note = 2' methoxy ethyl nucleoside
  modified_base 5: mod_base = OTHER; note = 2' fluoro-modified nucleoside
  modified_base 6: mod_base = OTHER; note = 2' O-methyl nucleoside
  modified_base 7: mod_base = OTHER; note = 2' fluoro-modified nucleoside
  modified_base 8: mod_base = OTHER; note = 2' fluoro-modified nucleoside
  modified_base 9: mod_base = OTHER; note = 2' fluoro-modified nucleoside
  modified_base 10: mod_base = OTHER; note = 2' fluoro-modified nucleoside
  modified_base 11: mod_base = OTHER; note = 2' O-methyl nucleoside
  modified_base 12: mod_base = OTHER; note = 2' O-methyl nucleoside
  modified_base 13: mod_base = OTHER; note = 2' methoxy ethyl nucleoside
  modified_base 14: mod_base = OTHER; note = 2' O-methyl nucleoside
  modified_base 15: mod_base = OTHER; note = 2' O-methyl nucleoside
  modified_base 16: mod_base = OTHER; note = 2' O-methyl nucleoside
  modified_base 17: mod_base = OTHER; note = 2' O-methyl nucleoside
  modified_base 18: mod_base = OTHER; note = 2' O-methyl nucleoside
  modified_base 19: mod_base = OTHER; note = 2' O-methyl nucleoside with phosphorothioate linkage
  modified_base 20: mod_base = OTHER; note = 2' O-methyl nucleoside with phosphorothioate linkage
  modified_base 21: mod_base = OTHER; note = 2' O-methyl nucleoside
cagacatcatgagttggtatt

SEQ ID NO: 3837 - RNA, 21 nt, synthetic construct
  source 1..21: mol_type = other RNA
  misc_feature 1: note = ETL17 moiety with a phosphorothioate linkage
  modified_base 1: mod_base = OTHER; note = 2' O-methyl nucleoside
  modified_base 2: mod_base = OTHER; note = 2' O-methyl nucleoside
  modified_base 3: mod_base = OTHER; note = 2' O-methyl nucleoside
  modified_base 4: mod_base = OTHER; note = 2' methoxy ethyl nucleoside
  modified_base 5: mod_base = OTHER; note = 2' fluoro-modified nucleoside
  modified_base 6: mod_base = OTHER; note = 2' O-methyl nucleoside
  modified_base 7: mod_base = OTHER; note = 2' fluoro-modified nucleoside
  modified_base 8: mod_base = OTHER; note = 2' fluoro-modified nucleoside
  modified_base 9: mod_base = OTHER; note = 2' fluoro-modified nucleoside
  modified_base 10: mod_base = OTHER; note = 2' fluoro-modified nucleoside
  modified_base 11: mod_base = OTHER; note = 2' O-methyl nucleoside
  modified_base 12: mod_base = OTHER; note = 2' O-methyl nucleoside
  modified_base 13: mod_base = OTHER; note = 2' methoxy ethyl thymine
  modified_base 14: mod_base = OTHER; note = 2' O-methyl nucleoside
  modified_base 15: mod_base = OTHER; note = 2' O-methyl nucleoside
  modified_base 16: mod_base = OTHER; note = 2' O-methyl nucleoside
  modified_base 17: mod_base = OTHER; note = 2' O-methyl nucleoside
  modified_base 18: mod_base = OTHER; note = 2' O-methyl nucleoside
  modified_base 19: mod_base = OTHER; note = 2' O-methyl nucleoside with phosphorothioate linkage
  modified_base 20: mod_base = OTHER; note = 2' O-methyl nucleoside with phosphorothioate linkage
  modified_base 21: mod_base = OTHER; note = 2' O-methyl nucleoside
tgagaagattcatttgatatt

SEQ ID NO: 3838 - RNA, 21 nt, synthetic construct
  source 1..21: mol_type = other RNA
  misc_feature 1: note = ETL17 moiety with a phosphorothioate linkage
  modified_base 1: mod_base = OTHER; note = 2' O-methyl nucleoside
  modified_base 2: mod_base = OTHER; note = 2' O-methyl nucleoside
  modified_base 3: mod_base = OTHER; note = 2' O-methyl nucleoside
  modified_base 4: mod_base = OTHER; note = 2' methoxy ethyl nucleoside
  modified_base 5: mod_base = OTHER; note = 2' O-methyl nucleoside
  modified_base 6: mod_base = OTHER; note = 2' fluoro-modified nucleoside
  modified_base 7: mod_base = OTHER; note = 2' fluoro-modified nucleoside
  modified_base 8: mod_base = OTHER; note = 2' fluoro-modified nucleoside
  modified_base 9: mod_base = OTHER; note = 2' fluoro-modified nucleoside
  modified_base 10: mod_base = OTHER; note = 2' O-methyl nucleoside
  modified_base 11: mod_base = OTHER; note = 2' O-methyl nucleoside
  modified_base 12: mod_base = OTHER; note = 2' methoxy ethyl nucleoside
  modified_base 13: mod_base = OTHER; note = 2' O-methyl nucleoside
  modified_base 14: mod_base = OTHER; note = 2' O-methyl nucleoside
  modified_base 15: mod_base = OTHER; note = 2' O-methyl nucleoside
  modified_base 16: mod_base = OTHER; note = 2' O-methyl nucleoside
  modified_base 17: mod_base = OTHER; note = 2' O-methyl nucleoside
  modified_base 18: mod_base = OTHER; note = 2' O-methyl nucleoside
  modified_base 19: mod_base = OTHER; note = 2' O-methyl nucleoside with phosphorothioate linkage
  modified_base 20: mod_base = OTHER; note = 2' O-methyl nucleoside with phosphorothioate linkage
  modified_base 21: mod_base = OTHER; note = 2' O-methyl nucleoside
tgagaagattcatttgatatt

SEQ ID NO: 3839 - RNA, 21 nt, synthetic construct
  source 1..21: mol_type = other RNA
  misc_feature 1: note = ETL17 moiety with a phosphorothioate linkage
  modified_base 1: mod_base = OTHER; note = 2' O-methyl nucleoside
  modified_base 2: mod_base = OTHER; note = 2' O-methyl nucleoside
  modified_base 3: mod_base = OTHER; note = 2' O-methyl nucleoside
  modified_base 4: mod_base = OTHER; note = 2' methoxy ethyl nucleoside
  modified_base 5: mod_base = OTHER; note = 2' O-methyl nucleoside
  modified_base 6: mod_base = OTHER; note = 2' fluoro-modified nucleoside
  modified_base 7: mod_base = OTHER; note = 2' fluoro-modified nucleoside
  modified_base 8: mod_base = OTHER; note = 2' fluoro-modified nucleoside
  modified_base 9: mod_base = OTHER; note = 2' fluoro-modified nucleoside
  modified_base 10: mod_base = OTHER; note = 2' O-methyl nucleoside
  modified_base 11: mod_base = OTHER; note = 2' O-methyl nucleoside
  modified_base 12: mod_base = OTHER; note = 2' O-methyl nucleoside
  modified_base 13: mod_base = OTHER; note = 2' methoxy ethyl thymine
  modified_base 14: mod_base = OTHER; note = 2' O-methyl nucleoside
  modified_base 15: mod_base = OTHER; note = 2' O-methyl nucleoside
  modified_base 16: mod_base = OTHER; note = 2' O-methyl nucleoside
  modified_base 17: mod_base = OTHER; note = 2' O-methyl nucleoside
  modified_base 18: mod_base = OTHER; note = 2' O-methyl nucleoside
  modified_base 19: mod_base = OTHER; note = 2' O-methyl nucleoside with phosphorothioate linkage
  modified_base 20: mod_base = OTHER; note = 2' O-methyl nucleoside with phosphorothioate linkage
  modified_base 21: mod_base = OTHER; note = 2' O-methyl nucleoside
tgagaagattcatttgatatt

SEQ ID NO: 3840 - RNA, 21 nt, synthetic construct
  source 1..21: mol_type = other RNA
  misc_feature 1: note = ETL17 moiety with a phosphorothioate linkage
  modified_base 1: mod_base = OTHER; note = 2' O-methyl nucleoside
  modified_base 2: mod_base = OTHER; note = 2' O-methyl nucleoside
  modified_base 3: mod_base = OTHER; note = 2' O-methyl nucleoside
  modified_base 4: mod_base = OTHER; note = 2' methoxy ethyl nucleoside
  modified_base 5: mod_base = OTHER; note = 2' O-methyl nucleoside
  modified_base 6: mod_base = OTHER; note = 2' fluoro-modified nucleoside
  modified_base 7: mod_base = OTHER; note = 2' fluoro-modified nucleoside
  modified_base 8: mod_base = OTHER; note = 2' fluoro-modified nucleoside
  modified_base 9: mod_base = OTHER; note = 2' fluoro-modified nucleoside
  modified_base 10: mod_base = OTHER; note = 2' O-methyl nucleoside
  modified_base 11: mod_base = OTHER; note = 2' O-methyl nucleoside
  modified_base 12: mod_base = OTHER; note = 2' O-methyl nucleoside
  modified_base 13: mod_base = OTHER; note = 2' O-methyl nucleoside
  modified_base 14: mod_base = OTHER; note = 2' methoxy ethyl thymine
  modified_base 15: mod_base = OTHER; note = 2' O-methyl nucleoside
  modified_base 16: mod_base = OTHER; note = 2' O-methyl nucleoside
  modified_base 17: mod_base = OTHER; note = 2' O-methyl nucleoside
  modified_base 18: mod_base = OTHER; note = 2' O-methyl nucleoside
  modified_base 19: mod_base = OTHER; note = 2' O-methyl nucleoside with phosphorothioate linkage
  modified_base 20: mod_base = OTHER; note = 2' O-methyl nucleoside with phosphorothioate linkage
  modified_base 21: mod_base = OTHER; note = 2' O-methyl nucleoside
tgagaagattcatttgatatt

SEQ ID NO: 3841 - RNA, 21 nt, synthetic construct
  source 1..21: mol_type = other RNA
  misc_feature 1: note = ETL17 moiety with a phosphorothioate linkage
  modified_base 1: mod_base = OTHER; note = 2' O-methyl nucleoside
  modified_base 2: mod_base = OTHER; note = 2' O-methyl nucleoside
  modified_base 3: mod_base = OTHER; note = 2' O-methyl nucleoside
  modified_base 4: mod_base = OTHER; note = 2' methoxy ethyl nucleoside
  modified_base 5: mod_base = OTHER; note = 2' fluoro-modified nucleoside
  modified_base 6: mod_base = OTHER; note = 2' O-methyl nucleoside
  modified_base 7: mod_base = OTHER; note = 2' fluoro-modified nucleoside
  modified_base 8: mod_base = OTHER; note = 2' fluoro-modified nucleoside
  modified_base 9: mod_base = OTHER; note = 2' fluoro-modified nucleoside
  modified_base 10: mod_base = OTHER; note = 2' fluoro-modified nucleoside
  modified_base 11: mod_base = OTHER; note = 2' O-methyl nucleoside
  modified_base 12: mod_base = OTHER; note = 2' O-methyl nucleoside
  modified_base 13: mod_base = OTHER; note = 2' methoxy ethyl thymine
  modified_base 14: mod_base = OTHER; note = 2' O-methyl nucleoside
  modified_base 15: mod_base = OTHER; note = 2' O-methyl nucleoside
  modified_base 16: mod_base = OTHER; note = 2' O-methyl nucleoside
  modified_base 17: mod_base = OTHER; note = 2' O-methyl nucleoside
  modified_base 18: mod_base = OTHER; note = 2' O-methyl nucleoside
  modified_base 19: mod_base = OTHER; note = 2' O-methyl nucleoside with phosphorothioate linkage
  modified_base 20: mod_base = OTHER; note = 2' O-methyl nucleoside with phosphorothioate linkage
  modified_base 21: mod_base = OTHER; note = 2' O-methyl nucleoside
gagaagattcatttgataatt

SEQ ID NO: 3842 - RNA, 21 nt, synthetic construct
  source 1..21: mol_type = other RNA
  misc_feature 1: note = ETL17 moiety with a phosphorothioate linkage
  modified_base 1: mod_base = OTHER; note = 2' O-methyl nucleoside
  modified_base 2: mod_base = OTHER; note = 2' O-methyl nucleoside
  modified_base 3: mod_base = OTHER; note = 2' O-methyl nucleoside
  modified_base 4: mod_base = OTHER; note = 2' methoxy ethyl nucleoside
  modified_base 5: mod_base = OTHER; note = 2' O-methyl nucleoside
  modified_base 6: mod_base = OTHER; note = 2' fluoro-modified nucleoside
  modified_base 7: mod_base = OTHER; note = 2' fluoro-modified nucleoside
  modified_base 8: mod_base = OTHER; note = 2' fluoro-modified nucleoside
  modified_base 9: mod_base = OTHER; note = 2' fluoro-modified nucleoside
  modified_base 10: mod_base = OTHER; note = 2' O-methyl nucleoside
  modified_base 11: mod_base = OTHER; note = 2' O-methyl nucleoside
  modified_base 12: mod_base = OTHER; note = 2' methoxy ethyl thymine
  modified_base 13: mod_base = OTHER; note = 2' O-methyl nucleoside
  modified_base 14: mod_base = OTHER; note = 2' O-methyl nucleoside
  modified_base 15: mod_base = OTHER; note = 2' O-methyl nucleoside
  modified_base 16: mod_base = OTHER; note = 2' O-methyl nucleoside
  modified_base 17: mod_base = OTHER; note = 2' O-methyl nucleoside
  modified_base 18: mod_base = OTHER; note = 2' O-methyl nucleoside
  modified_base 19: mod_base = OTHER; note = 2' O-methyl nucleoside with phosphorothioate linkage
  modified_base 20: mod_base = OTHER; note = 2' O-methyl nucleoside with phosphorothioate linkage
  modified_base 21: mod_base = OTHER; note = 2' O-methyl nucleoside
gagaagattcatttgataatt

SEQ ID NO: 3843 - RNA, 21 nt, synthetic construct
  source 1..21: mol_type = other RNA
  misc_feature 1: note = ETL17 moiety with a phosphorothioate linkage
  modified_base 1: mod_base = OTHER; note = 2' O-methyl nucleoside
  modified_base 2: mod_base = OTHER; note = 2' O-methyl nucleoside
  modified_base 3: mod_base = OTHER; note = 2' O-methyl nucleoside
  modified_base 4: mod_base = OTHER; note = 2' methoxy ethyl nucleoside
  modified_base 5: mod_base = OTHER; note = 2' O-methyl nucleoside
  modified_base 6: mod_base = OTHER; note = 2' fluoro-modified nucleoside
  modified_base 7: mod_base = OTHER; note = 2' fluoro-modified nucleoside
  modified_base 8: mod_base = OTHER; note = 2' fluoro-modified nucleoside
  modified_base 9: mod_base = OTHER; note = 2' fluoro-modified nucleoside
  modified_base 10: mod_base = OTHER; note = 2' O-methyl nucleoside
  modified_base 11: mod_base = OTHER; note = 2' O-methyl nucleoside
  modified_base 12: mod_base = OTHER; note = 2' O-methyl nucleoside
  modified_base 13: mod_base = OTHER; note = 2' methoxy ethyl thymine
  modified_base 14: mod_base = OTHER; note = 2' O-methyl nucleoside
  modified_base 15: mod_base = OTHER; note = 2' O-methyl nucleoside
  modified_base 16: mod_base = OTHER; note = 2' O-methyl nucleoside
  modified_base 17: mod_base = OTHER; note = 2' O-methyl nucleoside
  modified_base 18: mod_base = OTHER; note = 2' O-methyl nucleoside
  modified_base 19: mod_base = OTHER; note = 2' O-methyl nucleoside with phosphorothioate linkage
  modified_base 20: mod_base = OTHER; note = 2' O-methyl nucleoside with phosphorothioate linkage
  modified_base 21: mod_base = OTHER; note = 2' O-methyl nucleoside
gagaagattcatttgataatt

SEQ ID NO: 3844 - RNA, 21 nt, synthetic construct
  source 1..21: mol_type = other RNA
  modified_base 1: mod_base = OTHER; note = 2' O-methyl nucleoside with phosphorothioate linkage
  modified_base 2: mod_base = OTHER; note = 2' fluoro-modified nucleoside with phosphorothioate linkage
  modified_base 3: mod_base = OTHER; note = 2' O-methyl nucleoside
  modified_base 4: mod_base = OTHER; note = 2' fluoro-modified nucleoside
  modified_base 5: mod_base = OTHER; note = 2' O-methyl nucleoside
  modified_base 6: mod_base = OTHER; note = 2' fluoro-modified nucleoside
  modified_base 7: mod_base = OTHER; note = 2' O-methyl nucleoside
  modified_base 8: mod_base = OTHER; note = 2' fluoro-modified nucleoside
  modified_base 9: mod_base = OTHER; note = 2' O-methyl nucleoside
  modified_base 10: mod_base = OTHER; note = 2' fluoro-modified nucleoside
  modified_base 11: mod_base = OTHER; note = 2' O-methyl nucleoside
  modified_base 12: mod_base = OTHER; note = 2' fluoro-modified nucleoside
  modified_base 13: mod_base = OTHER; note = 2' O-methyl nucleoside
  modified_base 14: mod_base = OTHER; note = 2' fluoro-modified nucleoside
  modified_base 15: mod_base = OTHER; note = 2' O-methyl nucleoside
  modified_base 16: mod_base = OTHER; note = 2' fluoro-modified nucleoside
  modified_base 17: mod_base = OTHER; note = 2' O-methyl nucleoside
  modified_base 18: mod_base = OTHER; note = 2' fluoro-modified nucleoside
  modified_base 19: mod_base = OTHER; note = 2' O-methyl nucleoside with phosphorothioate linkage
  modified_base 20: mod_base = OTHER; note = 2' O-methyl nucleoside with phosphorothioate linkage
  modified_base 21: mod_base = OTHER; note = 2' O-methyl nucleoside
taccaactcatgatgtctgtt

SEQ ID NO: 3845 - RNA, 21 nt, synthetic construct
  source 1..21: mol_type = other RNA
  modified_base 1: mod_base = OTHER; note = 2' O-methyl nucleoside with phosphorothioate linkage
  modified_base 2: mod_base = OTHER; note = 2' fluoro-modified nucleoside with phosphorothioate linkage
  modified_base 3: mod_base = OTHER; note = 2' O-methyl nucleoside
  modified_base 4: mod_base = OTHER; note = 2' fluoro-modified nucleoside
  modified_base 5: mod_base = OTHER; note = 2' O-methyl nucleoside
  modified_base 6: mod_base = OTHER; note = 2' fluoro-modified nucleoside
  modified_base 7: mod_base = OTHER; note = 2' O-methyl nucleoside
  modified_base 8: mod_base = OTHER; note = 2' fluoro-modified nucleoside
  modified_base 9: mod_base = OTHER; note = 2' O-methyl nucleoside
  modified_base 10: mod_base = OTHER; note = 2' fluoro-modified nucleoside
  modified_base 11: mod_base = OTHER; note = 2' O-methyl nucleoside
  modified_base 12: mod_base = OTHER; note = 2' fluoro-modified nucleoside
  modified_base 13: mod_base = OTHER; note = 2' O-methyl nucleoside
  modified_base 14: mod_base = OTHER; note = 2' fluoro-modified nucleoside
  modified_base 15: mod_base = OTHER; note = 2' O-methyl nucleoside
  modified_base 16: mod_base = OTHER; note = 2' fluoro-modified nucleoside
  modified_base 17: mod_base = OTHER; note = 2' O-methyl nucleoside
  modified_base 18: mod_base = OTHER; note = 2' fluoro-modified nucleoside
  modified_base 19: mod_base = OTHER; note = 2' O-methyl nucleoside with phosphorothioate linkage
  modified_base 20: mod_base = OTHER; note = 2' O-methyl nucleoside with phosphorothioate linkage
  modified_base 21: mod_base = OTHER; note = 2' O-methyl nucleoside
tcagttgtctctggtagcatt

SEQ ID NO: 3846 - RNA, 21 nt, synthetic construct
  source 1..21: mol_type = other RNA
  modified_base 1: mod_base = OTHER; note = 2' O-methyl nucleoside with phosphorothioate linkage
  modified_base 2: mod_base = OTHER; note = 2' fluoro-modified nucleoside with phosphorothioate linkage
  modified_base 3: mod_base = OTHER; note = 2' O-methyl nucleoside
  modified_base 4: mod_base = OTHER; note = 2' fluoro-modified nucleoside
  modified_base 5: mod_base = OTHER; note = 2' O-methyl nucleoside
  modified_base 6: mod_base = OTHER; note = 2' fluoro-modified nucleoside
  modified_base 7: mod_base = OTHER; note = 2' O-methyl nucleoside
  modified_base 8: mod_base = OTHER; note = 2' fluoro-modified nucleoside
  modified_base 9: mod_base = OTHER; note = 2' O-methyl nucleoside
  modified_base 10: mod_base = OTHER; note = 2' fluoro-modified nucleoside
  modified_base 11: mod_base = OTHER; note = 2' O-methyl nucleoside
  modified_base 12: mod_base = OTHER; note = 2' fluoro-modified nucleoside
  modified_base 13: mod_base = OTHER; note = 2' O-methyl nucleoside
  modified_base 14: mod_base = OTHER; note = 2' fluoro-modified nucleoside
  modified_base 15: mod_base = OTHER; note = 2' O-methyl nucleoside
  modified_base 16: mod_base = OTHER; note = 2' fluoro-modified nucleoside
  modified_base 17: mod_base = OTHER; note = 2' O-methyl nucleoside
  modified_base 18: mod_base = OTHER; note = 2' fluoro-modified nucleoside
  modified_base 19: mod_base = OTHER; note = 2' O-methyl nucleoside with phosphorothioate linkage
  modified_base 20: mod_base = OTHER; note = 2' O-methyl nucleoside with phosphorothioate linkage
  modified_base 21: mod_base = OTHER; note = 2' O-methyl nucleoside
taccgaatctttcatctaatt

SEQ ID NO: 3847 - RNA, 21 nt, synthetic construct
  source 1..21: mol_type = other RNA
  modified_base 1: mod_base = OTHER; note = 2' O-methyl nucleoside with phosphorothioate linkage
  modified_base 2: mod_base = OTHER; note = 2' fluoro-modified nucleoside with phosphorothioate linkage
  modified_base 3: mod_base = OTHER; note = 2' O-methyl nucleoside
  modified_base 4: mod_base = OTHER; note = 2' fluoro-modified nucleoside
  modified_base 5: mod_base = OTHER; note = 2' O-methyl nucleoside
  modified_base 6: mod_base = OTHER; note = 2' fluoro-modified nucleoside
  modified_base 7: mod_base = OTHER; note = 2' O-methyl nucleoside
  modified_base 8: mod_base = OTHER; note = 2' fluoro-modified nucleoside
  modified_base 9: mod_base = OTHER; note = 2' O-methyl nucleoside
  modified_base 10: mod_base = OTHER; note = 2' fluoro-modified nucleoside
  modified_base 11: mod_base = OTHER; note = 2' O-methyl nucleoside
  modified_base 12: mod_base = OTHER; note = 2' fluoro-modified nucleoside
  modified_base 13: mod_base = OTHER; note = 2' O-methyl nucleoside
  modified_base 14: mod_base = OTHER; note = 2' fluoro-modified nucleoside
  modified_base 15: mod_base = OTHER; note = 2' O-methyl nucleoside
  modified_base 16: mod_base = OTHER; note = 2' fluoro-modified nucleoside
  modified_base 17: mod_base = OTHER; note = 2' O-methyl nucleoside
  modified_base 18: mod_base = OTHER; note = 2' fluoro-modified nucleoside
  modified_base 19: mod_base = OTHER; note = 2' O-methyl nucleoside with phosphorothioate linkage
  modified_base 20: mod_base = OTHER; note = 2' O-methyl nucleoside with phosphorothioate linkage
  modified_base 21: mod_base = OTHER; note = 2' O-methyl nucleoside
tgtccatccatttccagactt

SEQ ID NO: 3848 - RNA, 21 nt, synthetic construct
  source 1..21: mol_type = other RNA
  modified_base 1: mod_base = OTHER; note = 2' O-methyl nucleoside with phosphorothioate linkage
  modified_base 2: mod_base = OTHER; note = 2' fluoro-modified nucleoside with phosphorothioate linkage
  modified_base 3: mod_base = OTHER; note = 2' O-methyl nucleoside
  modified_base 4: mod_base = OTHER; note = 2' fluoro-modified nucleoside
  modified_base 5: mod_base = OTHER; note = 2' O-methyl nucleoside
  modified_base 6: mod_base = OTHER; note = 2' fluoro-modified nucleoside
  modified_base 7: mod_base = OTHER; note = 2' O-methyl nucleoside
  modified_base 8: mod_base = OTHER; note = 2' fluoro-modified nucleoside
  modified_base 9: mod_base = OTHER; note = 2' O-methyl nucleoside
  modified_base 10: mod_base = OTHER; note = 2' fluoro-modified nucleoside
  modified_base 11: mod_base = OTHER; note = 2' O-methyl nucleoside
  modified_base 12: mod_base = OTHER; note = 2' fluoro-modified nucleoside
  modified_base 13: mod_base = OTHER; note = 2' O-methyl nucleoside
  modified_base 14: mod_base = OTHER; note = 2' fluoro-modified nucleoside
  modified_base 15: mod_base = OTHER; note = 2' O-methyl nucleoside
  modified_base 16: mod_base = OTHER; note = 2' fluoro-modified nucleoside
  modified_base 17: mod_base = OTHER; note = 2' O-methyl nucleoside
  modified_base 18: mod_base = OTHER; note = 2' fluoro-modified nucleoside
  modified_base 19: mod_base = OTHER; note = 2' O-methyl nucleoside with phosphorothioate linkage
  modified_base 20: mod_base = OTHER; note = 2' O-methyl nucleoside with phosphorothioate linkage
  modified_base 21: mod_base = OTHER; note = 2' O-methyl nucleoside
tgtgccagtaggagacagatt

SEQ ID NO: 3849 - RNA, 21 nt, synthetic construct
  source 1..21: mol_type = other RNA
  modified_base 1: mod_base = OTHER; note = 2' O-methyl nucleoside with phosphorothioate linkage
  modified_base 2: mod_base = OTHER; note = 2' fluoro-modified nucleoside with phosphorothioate linkage
  modified_base 3: mod_base = OTHER; note = 2' O-methyl nucleoside
  modified_base 4: mod_base = OTHER; note = 2' fluoro-modified nucleoside
  modified_base 5: mod_base = OTHER; note = 2' O-methyl nucleoside
  modified_base 6: mod_base = OTHER; note = 2' fluoro-modified nucleoside
  modified_base 7: mod_base = OTHER; note = 2' O-methyl nucleoside
  modified_base 8: mod_base = OTHER; note = 2' fluoro-modified nucleoside
  modified_base 9: mod_base = OTHER; note = 2' O-methyl nucleoside
  modified_base 10: mod_base = OTHER; note = 2' fluoro-modified nucleoside
  modified_base 11: mod_base = OTHER; note = 2' O-methyl nucleoside
  modified_base 12: mod_base = OTHER; note = 2' fluoro-modified nucleoside
  modified_base 13: mod_base = OTHER; note = 2' O-methyl nucleoside
  modified_base 14: mod_base = OTHER; note = 2' fluoro-modified nucleoside
  modified_base 15: mod_base = OTHER; note = 2' O-methyl nucleoside
  modified_base 16: mod_base = OTHER; note = 2' fluoro-modified nucleoside
  modified_base 17: mod_base = OTHER; note = 2' O-methyl nucleoside
  modified_base 18: mod_base = OTHER; note = 2' fluoro-modified nucleoside
  modified_base 19: mod_base = OTHER; note = 2' O-methyl nucleoside with phosphorothioate linkage
  modified_base 20: mod_base = OTHER; note = 2' O-methyl nucleoside with phosphorothioate linkage
  modified_base 21: mod_base = OTHER; note = 2' O-methyl nucleoside
ttctgttgtgccagtaggatt

SEQ ID NO: 3850 - RNA, 21 nt, synthetic construct
  source 1..21: mol_type = other RNA
  modified_base 1: mod_base = OTHER; note = 2' O-methyl nucleoside with phosphorothioate linkage
  modified_base 2: mod_base = OTHER; note = 2' fluoro-modified nucleoside with phosphorothioate linkage
  modified_base 3: mod_base = OTHER; note = 2' O-methyl nucleoside
  modified_base 4: mod_base = OTHER; note = 2' fluoro-modified nucleoside
  modified_base 5: mod_base = OTHER; note = 2' O-methyl nucleoside
  modified_base 6: mod_base = OTHER; note = 2' fluoro-modified nucleoside
  modified_base 7: mod_base = OTHER; note = 2' O-methyl nucleoside
  modified_base 8: mod_base = OTHER; note = 2' fluoro-modified nucleoside
  modified_base 9: mod_base = OTHER; note = 2' O-methyl nucleoside
  modified_base 10: mod_base = OTHER; note = 2' fluoro-modified nucleoside
  modified_base 11: mod_base = OTHER; note = 2' O-methyl nucleoside
  modified_base 12: mod_base = OTHER; note = 2' fluoro-modified nucleoside
  modified_base 13: mod_base = OTHER; note = 2' O-methyl nucleoside
  modified_base 14: mod_base = OTHER; note = 2' fluoro-modified nucleoside
  modified_base 15: mod_base = OTHER; note = 2' O-methyl nucleoside
  modified_base 16: mod_base = OTHER; note = 2' fluoro-modified nucleoside
  modified_base 17: mod_base = OTHER; note = 2' O-methyl nucleoside
  modified_base 18: mod_base = OTHER; note = 2' fluoro-modified nucleoside
  modified_base 19: mod_base = OTHER; note = 2' O-methyl nucleoside with phosphorothioate linkage
  modified_base 20: mod_base = OTHER; note = 2' O-methyl nucleoside with phosphorothioate linkage
  modified_base 21: mod_base = OTHER; note = 2' O-methyl nucleoside
taatcttctcatttcccagtt

SEQ ID NO: 3851 - RNA, 21 nt, synthetic construct
  source 1..21: mol_type = other RNA
  modified_base 1: mod_base = OTHER; note = 2' O-methyl nucleoside with phosphorothioate linkage
  modified_base 2: mod_base = OTHER; note = 2' fluoro-modified nucleoside with phosphorothioate linkage
  modified_base 3: mod_base = OTHER; note = 2' O-methyl nucleoside
  modified_base 4: mod_base = OTHER; note = 2' fluoro-modified nucleoside
  modified_base 5: mod_base = OTHER; note = 2' O-methyl nucleoside
  modified_base 6: mod_base = OTHER; note = 2' fluoro-modified nucleoside
  modified_base 7: mod_base = OTHER; note = 2' O-methyl nucleoside
  modified_base 8: mod_base = OTHER; note = 2' fluoro-modified nucleoside
  modified_base 9: mod_base = OTHER; note = 2' O-methyl nucleoside
  modified_base 10: mod_base = OTHER; note = 2' fluoro-modified nucleoside
  modified_base 11: mod_base = OTHER; note = 2' O-methyl nucleoside
  modified_base 12: mod_base = OTHER; note = 2' fluoro-modified nucleoside
  modified_base 13: mod_base = OTHER; note = 2' O-methyl nucleoside
  modified_base 14: mod_base = OTHER; note = 2' fluoro-modified nucleoside
  modified_base 15: mod_base = OTHER; note = 2' O-methyl nucleoside
  modified_base 16: mod_base = OTHER; note = 2' fluoro-modified nucleoside
  modified_base 17: mod_base = OTHER; note = 2' O-methyl nucleoside
  modified_base 18: mod_base = OTHER; note = 2' fluoro-modified nucleoside
  modified_base 19: mod_base = OTHER; note = 2' O-methyl nucleoside with phosphorothioate linkage
  modified_base 20: mod_base = OTHER; note = 2' O-methyl nucleoside with phosphorothioate linkage
  modified_base 21: mod_base = OTHER; note = 2' O-methyl nucleoside
ttgaatcttctcatttccctt

SEQ ID NO: 3852 - RNA, 21 nt, synthetic construct
  source 1..21: mol_type = other RNA
  modified_base 1: mod_base = OTHER; note = 2' O-methyl nucleoside with phosphorothioate linkage
  modified_base 2: mod_base = OTHER; note = 2' fluoro-modified nucleoside with phosphorothioate linkage
  modified_base 3: mod_base = OTHER; note = 2' O-methyl nucleoside
  modified_base 4: mod_base = OTHER; note = 2' fluoro-modified nucleoside
  modified_base 5: mod_base = OTHER; note = 2' O-methyl nucleoside
  modified_base 6: mod_base = OTHER; note = 2' fluoro-modified nucleoside
  modified_base 7: mod_base = OTHER; note = 2' O-methyl nucleoside
  modified_base 8: mod_base = OTHER; note = 2' fluoro-modified nucleoside
  modified_base 9: mod_base = OTHER; note = 2' O-methyl nucleoside
  modified_base 10: mod_base = OTHER; note = 2' fluoro-modified nucleoside
  modified_base 11: mod_base = OTHER; note = 2' O-methyl nucleoside
  modified_base 12: mod_base = OTHER; note = 2' fluoro-modified nucleoside
  modified_base 13: mod_base = OTHER; note = 2' O-methyl nucleoside
  modified_base 14: mod_base = OTHER; note = 2' fluoro-modified nucleoside
  modified_base 15: mod_base = OTHER; note = 2' O-methyl nucleoside
  modified_base 16: mod_base = OTHER; note = 2' fluoro-modified nucleoside
  modified_base 17: mod_base = OTHER; note = 2' O-methyl nucleoside
  modified_base 18: mod_base = OTHER; note = 2' fluoro-modified nucleoside
  modified_base 19: mod_base = OTHER; note = 2' O-methyl nucleoside with phosphorothioate linkage
  modified_base 20: mod_base = OTHER; note = 2' O-methyl nucleoside with phosphorothioate linkage
  modified_base 21: mod_base = OTHER; note = 2' O-methyl nucleoside
tatcaaatgaatcttctcatt

SEQ ID NO: 3853 - RNA, 21 nt, synthetic construct
  source 1..21: mol_type = other RNA
  modified_base 1: mod_base = OTHER; note = 2' O-methyl nucleoside with phosphorothioate linkage
  modified_base 2: mod_base = OTHER; note = 2' fluoro-modified nucleoside with phosphorothioate linkage
  modified_base 3: mod_base = OTHER; note = 2' O-methyl nucleoside
  modified_base 4: mod_base = OTHER; note = 2' fluoro-modified nucleoside
  modified_base 5: mod_base = OTHER; note = 2' O-methyl nucleoside
  modified_base 6: mod_base = OTHER; note = 2' fluoro-modified nucleoside
  modified_base 7: mod_base = OTHER; note = 2' O-methyl nucleoside
  modified_base 8: mod_base = OTHER; note = 2' fluoro-modified nucleoside
  modified_base 9: mod_base = OTHER; note = 2' O-methyl nucleoside
  modified_base 10: mod_base = OTHER; note = 2' fluoro-modified nucleoside
  modified_base 11: mod_base = OTHER; note = 2' O-methyl nucleoside
  modified_base 12: mod_base = OTHER; note = 2' fluoro-modified nucleoside
  modified_base 13: mod_base = OTHER; note = 2' O-methyl nucleoside
  modified_base 14: mod_base = OTHER; note = 2' fluoro-modified nucleoside
  modified_base 15: mod_base = OTHER; note = 2' O-methyl nucleoside
  modified_base 16: mod_base = OTHER; note = 2' fluoro-modified nucleoside
  modified_base 17: mod_base = OTHER; note = 2' O-methyl nucleoside
  modified_base 18: mod_base = OTHER; note = 2' fluoro-modified nucleoside
  modified_base 19: mod_base = OTHER; note = 2' O-methyl nucleoside with phosphorothioate linkage
  modified_base 20: mod_base = OTHER; note = 2' O-methyl nucleoside with phosphorothioate linkage
  modified_base 21: mod_base = OTHER; note = 2' O-methyl nucleoside
ttatcaaatgaatcttctctt

SEQ ID NO: 3854 - RNA, 21 nt, synthetic construct
  source 1..21: mol_type = other RNA
  modified_base 1: mod_base = OTHER; note = 2' O-methyl nucleoside with phosphorothioate linkage
  modified_base 2: mod_base = OTHER; note = 2' fluoro-modified nucleoside with phosphorothioate linkage
  modified_base 3: mod_base = OTHER; note = 2' O-methyl nucleoside
  modified_base 4: mod_base = OTHER; note = 2' fluoro-modified nucleoside
  modified_base 5: mod_base = OTHER; note = 2' O-methyl nucleoside
  modified_base 6: mod_base = OTHER; note = 2' fluoro-modified nucleoside
  modified_base 7: mod_base = OTHER; note = 2' O-methyl nucleoside
  modified_base 8: mod_base = OTHER; note = 2' fluoro-modified nucleoside
  modified_base 9: mod_base = OTHER; note = 2' O-methyl nucleoside
  modified_base 10: mod_base = OTHER; note = 2' fluoro-modified nucleoside
  modified_base 11: mod_base = OTHER; note = 2' O-methyl nucleoside
  modified_base 12: mod_base = OTHER; note = 2' fluoro-modified nucleoside
  modified_base 13: mod_base = OTHER; note = 2' O-methyl nucleoside
  modified_base 14: mod_base = OTHER; note = 2' fluoro-modified nucleoside
  modified_base 15: mod_base = OTHER; note = 2' O-methyl nucleoside
  modified_base 16: mod_base = OTHER; note = 2' fluoro-modified nucleoside
  modified_base 17: mod_base = OTHER; note = 2' O-methyl nucleoside
  modified_base 18: mod_base = OTHER; note = 2' fluoro-modified nucleoside
  modified_base 19: mod_base = OTHER; note = 2' O-methyl nucleoside with phosphorothioate linkage
  modified_base 20: mod_base = OTHER; note = 2' O-methyl nucleoside with phosphorothioate linkage
  modified_base 21: mod_base = OTHER; note = 2' O-methyl nucleoside
tgtactgaactgcatgccatt

SEQ ID NO: 3855 - RNA, 21 nt, synthetic construct
  source 1..21: mol_type = other RNA
  modified_base 1: mod_base = OTHER; note = 2' O-methyl nucleoside with phosphorothioate linkage
  modified_base 2: mod_base = OTHER; note = 2' fluoro-modified nucleoside with phosphorothioate linkage
  modified_base 3: mod_base = OTHER; note = 2' O-methyl nucleoside
  modified_base 4: mod_base = OTHER; note = 2' fluoro-modified nucleoside
  modified_base 5: mod_base = OTHER; note = 2' O-methyl nucleoside
  modified_base 6: mod_base = OTHER; note = 2' fluoro-modified nucleoside
  modified_base 7: mod_base = OTHER; note = 2' O-methyl nucleoside
  modified_base 8: mod_base = OTHER; note = 2' fluoro-modified nucleoside
  modified_base 9: mod_base = OTHER; note = 2' O-methyl nucleoside
  modified_base 10: mod_base = OTHER; note = 2' fluoro-modified nucleoside
  modified_base 11: mod_base = OTHER; note = 2' O-methyl nucleoside
  modified_base 12: mod_base = OTHER; note = 2' fluoro-modified nucleoside
  modified_base 13: mod_base = OTHER; note = 2' O-methyl nucleoside
  modified_base 14: mod_base = OTHER; note = 2' fluoro-modified nucleoside
  modified_base 15: mod_base = OTHER; note = 2' O-methyl nucleoside
  modified_base 16: mod_base = OTHER; note = 2' fluoro-modified nucleoside
  modified_base 17: mod_base = OTHER; note = 2' O-methyl nucleoside
  modified_base 18: mod_base = OTHER; note = 2' fluoro-modified nucleoside
  modified_base 19: mod_base = OTHER; note = 2' O-methyl nucleoside with phosphorothioate linkage
  modified_base 20: mod_base = OTHER; note = 2' O-methyl nucleoside with phosphorothioate linkage
  modified_base 21: mod_base = OTHER; note = 2' O-methyl nucleoside
tcaggtactgaactgcatgtt

SEQ ID NO: 3856 - RNA, 21 nt, synthetic construct
  source 1..21: mol_type = other RNA
  modified_base 1: mod_base = OTHER; note = 2' O-methyl nucleoside with phosphorothioate linkage
  modified_base 2: mod_base = OTHER; note = 2' fluoro-modified nucleoside with phosphorothioate linkage
  modified_base 3: mod_base = OTHER; note = 2' O-methyl nucleoside
  modified_base 4: mod_base = OTHER; note = 2' fluoro-modified nucleoside
  modified_base 5: mod_base = OTHER; note = 2' O-methyl nucleoside
  modified_base 6: mod_base = OTHER; note = 2' fluoro-modified nucleoside
  modified_base 7: mod_base = OTHER; note = 2' O-methyl nucleoside
  modified_base 8: mod_base = OTHER; note = 2' fluoro-modified nucleoside
  modified_base 9: mod_base = OTHER; note = 2' O-methyl nucleoside
  modified_base 10: mod_base = OTHER; note = 2' fluoro-modified nucleoside
  modified_base 11: mod_base = OTHER; note = 2' O-methyl nucleoside
  modified_base 12: mod_base = OTHER; note = 2' fluoro-modified nucleoside
  modified_base 13: mod_base = OTHER; note = 2' O-methyl nucleoside
  modified_base 14: mod_base = OTHER; note = 2' fluoro-modified nucleoside
  modified_base 15: mod_base = OTHER; note = 2' O-methyl nucleoside
  modified_base 16: mod_base = OTHER; note = 2' fluoro-modified nucleoside
  modified_base 17: mod_base = OTHER; note = 2' O-methyl nucleoside
  modified_base 18: mod_base = OTHER; note = 2' fluoro-modified nucleoside
  modified_base 19: mod_base = OTHER; note = 2' O-methyl nucleoside with phosphorothioate linkage
  modified_base 20: mod_base = OTHER; note = 2' O-methyl nucleoside with phosphorothioate linkage
  modified_base 21: mod_base = OTHER; note = 2' O-methyl nucleoside
tcccaggtactgaactgcatt

SEQ ID NO: 3857 - RNA, 21 nt, synthetic construct
  source 1..21: mol_type = other RNA
  modified_base 1: mod_base = OTHER; note = 2' O-methyl nucleoside with phosphorothioate linkage
  modified_base 2: mod_base = OTHER; note = 2' fluoro-modified nucleoside with phosphorothioate linkage
  modified_base 3: mod_base = OTHER; note = 2' O-methyl nucleoside
  modified_base 4: mod_base = OTHER; note = 2' fluoro-modified nucleoside
  modified_base 5: mod_base = OTHER; note = 2' O-methyl nucleoside
  modified_base 6: mod_base = OTHER; note = 2' fluoro-modified nucleoside
  modified_base 7: mod_base = OTHER; note = 2' O-methyl nucleoside
  modified_base 8: mod_base = OTHER; note = 2' fluoro-modified nucleoside
  modified_base 9: mod_base = OTHER; note = 2' O-methyl nucleoside
  modified_base 10: mod_base = OTHER; note = 2' fluoro-modified nucleoside
  modified_base 11: mod_base = OTHER; note = 2' O-methyl nucleoside
  modified_base 12: mod_base = OTHER; note = 2' fluoro-modified nucleoside
  modified_base 13: mod_base = OTHER; note = 2' O-methyl nucleoside
  modified_base 14: mod_base = OTHER; note = 2' fluoro-modified nucleoside
  modified_base 15: mod_base = OTHER; note = 2' O-methyl nucleoside
  modified_base 16: mod_base = OTHER; note = 2' fluoro-modified nucleoside
  modified_base 17: mod_base = OTHER; note = 2' O-methyl nucleoside
  modified_base 18: mod_base = OTHER; note = 2' fluoro-modified nucleoside
  modified_base 19: mod_base = OTHER; note = 2' O-methyl nucleoside with phosphorothioate linkage
  modified_base 20: mod_base = OTHER; note = 2' O-methyl nucleoside with phosphorothioate linkage
  modified_base 21: mod_base = OTHER; note = 2' O-methyl nucleoside
tgtcccaggtactgaactgtt

SEQ ID NO: 3858 - RNA, 21 nt, synthetic construct
  source 1..21: mol_type = other RNA
  modified_base 1: mod_base = OTHER; note = 2' O-methyl nucleoside with phosphorothioate linkage
  modified_base 2: mod_base = OTHER; note = 2' fluoro-modified nucleoside with phosphorothioate linkage
  modified_base 3: mod_base = OTHER; note = 2' O-methyl nucleoside
  modified_base 4: mod_base = OTHER; note = 2' fluoro-modified nucleoside
  modified_base 5: mod_base = OTHER; note = 2' O-methyl nucleoside
  modified_base 6: mod_base = OTHER; note = 2' fluoro-modified nucleoside
  modified_base 7: mod_base = OTHER; note = 2' O-methyl nucleoside
  modified_base 8: mod_base = OTHER; note = 2' fluoro-modified nucleoside
  modified_base 9: mod_base = OTHER; note = 2' O-methyl nucleoside
  modified_base 10: mod_base = OTHER; note = 2' fluoro-modified nucleoside
  modified_base 11: mod_base = OTHER; note = 2' O-methyl nucleoside
  modified_base 12: mod_base = OTHER; note = 2' fluoro-modified nucleoside
  modified_base 13: mod_base = OTHER; note = 2' O-methyl nucleoside
  modified_base 14: mod_base = OTHER; note = 2' fluoro-modified nucleoside
  modified_base 15: mod_base = OTHER; note = 2' O-methyl nucleoside
  modified_base 16: mod_base = OTHER; note = 2' fluoro-modified nucleoside
  modified_base 17: mod_base = OTHER; note = 2' O-methyl nucleoside
  modified_base 18: mod_base = OTHER; note = 2' fluoro-modified nucleoside
  modified_base 19: mod_base = OTHER; note = 2' O-methyl nucleoside with phosphorothioate linkage
  modified_base 20: mod_base = OTHER; note = 2' O-methyl nucleoside with phosphorothioate linkage
  modified_base 21: mod_base = OTHER; note = 2' O-methyl nucleoside
ttgtcccaggtactgaacttt

SEQ ID NO: 3859 - RNA, 21 nt, synthetic construct
  source 1..21: mol_type = other RNA
  modified_base 1: mod_base = OTHER; note = 2' O-methyl nucleoside with phosphorothioate linkage
  modified_base 2: mod_base = OTHER; note = 2' fluoro-modified nucleoside with phosphorothioate linkage
  modified_base 3: mod_base = OTHER; note = 2' O-methyl nucleoside
  modified_base 4: mod_base = OTHER; note = 2' fluoro-modified nucleoside
  modified_base 5: mod_base = OTHER; note = 2' O-methyl nucleoside
  modified_base 6: mod_base = OTHER; note = 2' fluoro-modified nucleoside
  modified_base 7: mod_base = OTHER; note = 2' O-methyl nucleoside
  modified_base 8: mod_base = OTHER; note = 2' fluoro-modified nucleoside
  modified_base 9: mod_base = OTHER; note = 2' O-methyl nucleoside
  modified_base 10: mod_base = OTHER; note = 2' fluoro-modified nucleoside
  modified_base 11: mod_base = OTHER; note = 2' O-methyl nucleoside
  modified_base 12: mod_base = OTHER; note = 2' fluoro-modified nucleoside
  modified_base 13: mod_base = OTHER; note = 2' O-methyl nucleoside
  modified_base 14: mod_base = OTHER; note = 2' fluoro-modified nucleoside
  modified_base 15: mod_base = OTHER; note = 2' O-methyl nucleoside
  modified_base 16: mod_base = OTHER; note = 2' fluoro-modified nucleoside
  modified_base 17: mod_base = OTHER; note = 2' O-methyl nucleoside
  modified_base 18: mod_base = OTHER; note = 2' fluoro-modified nucleoside
  modified_base 19: mod_base = OTHER; note = 2' O-methyl nucleoside with phosphorothioate linkage
  modified_base 20: mod_base = OTHER; note = 2' O-methyl nucleoside with phosphorothioate linkage
  modified_base 21: mod_base = OTHER; note = 2' O-methyl nucleoside
tttgtcattgtcccaggtatt

SEQ ID NO: 3860 - RNA, 21 nt, synthetic construct
  source 1..21: mol_type = other RNA
  modified_base 1: mod_base = OTHER; note = 2' O-methyl nucleoside with phosphorothioate linkage
  modified_base 2: mod_base = OTHER; note = 2' fluoro-modified nucleoside with phosphorothioate linkage
  modified_base 3: mod_base = OTHER; note = 2' O-methyl nucleoside
  modified_base 4: mod_base = OTHER; note = 2' fluoro-modified nucleoside
  modified_base 5: mod_base = OTHER; note = 2' O-methyl nucleoside
  modified_base 6: mod_base = OTHER; note = 2' fluoro-modified nucleoside
  modified_base 7: mod_base = OTHER; note = 2' O-methyl nucleoside
  modified_base 8: mod_base = OTHER; note = 2' fluoro-modified nucleoside
  modified_base 9: mod_base = OTHER; note = 2' O-methyl nucleoside
  modified_base 10: mod_base = OTHER; note = 2' fluoro-modified nucleoside
  modified_base 11: mod_base = OTHER; note = 2' O-methyl nucleoside
  modified_base 12: mod_base = OTHER; note = 2' fluoro-modified nucleoside
  modified_base 13: mod_base = OTHER; note = 2' O-methyl nucleoside
  modified_base 14: mod_base = OTHER; note = 2' fluoro-modified nucleoside
  modified_base 15: mod_base = OTHER; note = 2' O-methyl nucleoside
  modified_base 16: mod_base = OTHER; note = 2' fluoro-modified nucleoside
  modified_base 17: mod_base = OTHER; note = 2' O-methyl nucleoside
  modified_base 18: mod_base = OTHER; note = 2' fluoro-modified nucleoside
  modified_base 19: mod_base = OTHER; note = 2' O-methyl nucleoside with phosphorothioate linkage
  modified_base 20: mod_base = OTHER; note = 2' O-methyl nucleoside with phosphorothioate linkage
  modified_base 21: mod_base = OTHER; note = 2' O-methyl nucleoside
ttcaaacttatcattgtcatt

SEQ ID NO: 3861 - RNA, 21 nt, synthetic construct
  source 1..21: mol_type = other RNA
  modified_base 1: mod_base = OTHER; note = 2' O-methyl nucleoside with phosphorothioate linkage
  modified_base 2: mod_base = OTHER; note = 2' fluoro-modified nucleoside with phosphorothioate linkage
  modified_base 3: mod_base = OTHER; note = 2' O-methyl nucleoside
  modified_base 4: mod_base = OTHER; note = 2' fluoro-modified nucleoside
  modified_base 5: mod_base = OTHER; note = 2' O-methyl nucleoside
  modified_base 6: mod_base = OTHER; note = 2' fluoro-modified nucleoside
  modified_base 7: mod_base = OTHER; note = 2' O-methyl nucleoside
  modified_base 8: mod_base = OTHER; note = 2' fluoro-modified nucleoside
  modified_base 9: mod_base = OTHER; note = 2' O-methyl nucleoside
  modified_base 10: mod_base = OTHER; note = 2' fluoro-modified nucleoside
  modified_base 11: mod_base = OTHER; note = 2' O-methyl nucleoside
  modified_base 12: mod_base = OTHER; note = 2' fluoro-modified nucleoside
  modified_base 13: mod_base = OTHER; note = 2' O-methyl nucleoside
  modified_base 14: mod_base = OTHER; note = 2' fluoro-modified nucleoside
  modified_base 15: mod_base = OTHER; note = 2' O-methyl nucleoside
  modified_base 16: mod_base = OTHER; note = 2' fluoro-modified nucleoside
  modified_base 17: mod_base = OTHER; note = 2' O-methyl nucleoside
  modified_base 18: mod_base = OTHER; note = 2' fluoro-modified nucleoside
  modified_base 19: mod_base = OTHER; note = 2' O-methyl nucleoside with phosphorothioate linkage
  modified_base 20: mod_base = OTHER; note = 2' O-methyl nucleoside with phosphorothioate linkage
  modified_base 21: mod_base = OTHER; note = 2' O-methyl nucleoside
tacagttgccttcaaactttt

SEQ ID NO: 3862 - RNA, 21 nt, synthetic construct
  source 1..21: mol_type = other RNA
  modified_base 1: mod_base = OTHER; note = 2' O-methyl nucleoside with phosphorothioate linkage
  modified_base 2: mod_base = OTHER; note = 2' fluoro-modified nucleoside with phosphorothioate linkage
  modified_base 3: mod_base = OTHER; note = 2' O-methyl nucleoside
  modified_base 4: mod_base = OTHER; note = 2' fluoro-modified nucleoside
  modified_base 5: mod_base = OTHER; note = 2' O-methyl nucleoside
  modified_base 6: mod_base = OTHER; note = 2' fluoro-modified nucleoside
  modified_base 7: mod_base = OTHER; note = 2' O-methyl nucleoside
  modified_base 8: mod_base = OTHER; note = 2' fluoro-modified nucleoside
  modified_base 9: mod_base = OTHER; note = 2' O-methyl nucleoside
  modified_base 10: mod_base = OTHER; note = 2' fluoro-modified nucleoside
  modified_base 11: mod_base = OTHER; note = 2' O-methyl nucleoside
  modified_base 12: mod_base = OTHER; note = 2' fluoro-modified nucleoside
  modified_base 13: mod_base = OTHER; note = 2' O-methyl nucleoside
  modified_base 14: mod_base = OTHER; note = 2' fluoro-modified nucleoside
  modified_base 15: mod_base = OTHER; note = 2' O-methyl nucleoside
  modified_base 16: mod_base = OTHER; note = 2' fluoro-modified nucleoside
  modified_base 17: mod_base = OTHER; note = 2' O-methyl nucleoside
  modified_base 18: mod_base = OTHER; note = 2' fluoro-modified nucleoside
  modified_base 19: mod_base = OTHER; note = 2' O-methyl nucleoside with phosphorothioate linkage
  modified_base 20: mod_base = OTHER; note = 2' O-methyl nucleoside with phosphorothioate linkage
  modified_base 21: mod_base = OTHER; note = 2' O-methyl nucleoside
tgatgcttttgagtaagtgtt

SEQ ID NO: 3863 - RNA, 21 nt, synthetic construct
  source 1..21: mol_type = other RNA
  modified_base 1: mod_base = OTHER; note = 2' O-methyl nucleoside with phosphorothioate linkage
  modified_base 2: mod_base = OTHER; note = 2' fluoro-modified nucleoside with phosphorothioate linkage
  modified_base 3: mod_base = OTHER; note = 2' O-methyl nucleoside
  modified_base 4: mod_base = OTHER; note = 2' fluoro-modified nucleoside
  modified_base 5: mod_base = OTHER; note = 2' O-methyl nucleoside
  modified_base 6: mod_base = OTHER; note = 2' fluoro-modified nucleoside
  modified_base 7: mod_base = OTHER; note = 2' O-methyl nucleoside
  modified_base 8: mod_base = OTHER; note = 2' fluoro-modified nucleoside
  modified_base 9: mod_base = OTHER; note = 2' O-methyl nucleoside
  modified_base 10: mod_base = OTHER; note = 2' fluoro-modified nucleoside
  modified_base 11: mod_base = OTHER; note = 2' O-methyl nucleoside
  modified_base 12: mod_base = OTHER; note = 2' fluoro-modified nucleoside
  modified_base 13: mod_base = OTHER; note = 2' O-methyl nucleoside
  modified_base 14: mod_base = OTHER; note = 2' fluoro-modified nucleoside
  modified_base 15: mod_base = OTHER; note = 2' O-methyl nucleoside
  modified_base 16: mod_base = OTHER; note = 2' fluoro-modified nucleoside
  modified_base 17: mod_base = OTHER; note = 2' O-methyl nucleoside
  modified_base 18: mod_base = OTHER; note = 2' fluoro-modified nucleoside
  modified_base 19: mod_base = OTHER; note = 2' O-methyl nucleoside with phosphorothioate linkage
  modified_base 20: mod_base = OTHER; note = 2' O-methyl nucleoside with phosphorothioate linkage
  modified_base 21: mod_base = OTHER; note = 2' O-methyl nucleoside
taaccattaggagtagatgtt

SEQ ID NO: 3864 - RNA, 21 nt, synthetic construct
  source 1..21: mol_type = other RNA
  modified_base 1: mod_base = OTHER; note = 2' O-methyl nucleoside with phosphorothioate linkage
  modified_base 2: mod_base = OTHER; note = 2' fluoro-modified nucleoside with phosphorothioate linkage
  modified_base 3: mod_base = OTHER; note = 2' O-methyl nucleoside
  modified_base 4: mod_base = OTHER; note = 2' O-methyl nucleoside
  modified_base 5: mod_base = OTHER; note = 2' O-methyl nucleoside
  modified_base 6: mod_base = OTHER; note = 2' fluoro-modified nucleoside
  modified_base 7: mod_base = OTHER; note = 2' O-methyl nucleoside
  modified_base 8: mod_base = OTHER; note = 2' fluoro-modified nucleoside
  modified_base 9: mod_base = OTHER; note = 2' O-methyl nucleoside
  modified_base 10: mod_base = OTHER; note = 2' fluoro-modified nucleoside
  modified_base 11: mod_base = OTHER; note = 2' O-methyl nucleoside
  modified_base 12: mod_base = OTHER; note = 2' fluoro-modified nucleoside
  modified_base 13: mod_base = OTHER; note = 2' O-methyl nucleoside
  modified_base 14: mod_base = OTHER; note = 2' fluoro-modified nucleoside
  modified_base 15: mod_base = OTHER; note = 2' O-methyl nucleoside
  modified_base 16: mod_base = OTHER; note = 2' fluoro-modified nucleoside
  modified_base 17: mod_base = OTHER; note = 2' O-methyl nucleoside
  modified_base 18: mod_base = OTHER; note = 2' fluoro-modified nucleoside
  modified_base 19: mod_base = OTHER; note = 2' O-methyl nucleoside with phosphorothioate linkage
  modified_base 20: mod_base = OTHER; note = 2' O-methyl nucleoside with phosphorothioate linkage
  modified_base 21: mod_base = OTHER; note = 2' O-methyl nucleoside
tatcaaatgaatcttctcatt

SEQ ID NO: 3865 - RNA, 21 nt, synthetic construct
  source 1..21: mol_type = other RNA
  modified_base 1: mod_base = OTHER; note = 2' O-methyl nucleoside with phosphorothioate linkage
  modified_base 2: mod_base = OTHER; note = 2' fluoro-modified nucleoside with phosphorothioate linkage
  modified_base 3: mod_base = OTHER; note = 2' O-methyl nucleoside
  modified_base 4: mod_base = OTHER; note = 2' O-methyl nucleoside
  modified_base 5: mod_base = OTHER; note = 2' O-methyl nucleoside
  modified_base 6: mod_base = OTHER; note = 2' fluoro-modified nucleoside
  modified_base 7: mod_base = OTHER; note = 2' fluoro-modified nucleoside
  modified_base 8: mod_base = OTHER; note = 2' O-methyl nucleoside
  modified_base 9: mod_base = OTHER; note = 2' O-methyl nucleoside
  modified_base 10: mod_base = OTHER; note = 2' fluoro-modified nucleoside
  modified_base 11: mod_base = OTHER; note = 2' O-methyl nucleoside
  modified_base 12: mod_base = OTHER; note = 2' fluoro-modified nucleoside
  modified_base 13: mod_base = OTHER; note = 2' O-methyl nucleoside
  modified_base 14: mod_base = OTHER; note = 2' fluoro-modified nucleoside
  modified_base 15: mod_base = OTHER; note = 2' O-methyl nucleoside
  modified_base 16: mod_base = OTHER; note = 2' fluoro-modified nucleoside
  modified_base 17: mod_base = OTHER; note = 2' O-methyl nucleoside
  modified_base 18: mod_base = OTHER; note = 2' fluoro-modified nucleoside
  modified_base 19: mod_base = OTHER; note = 2' O-methyl nucleoside with phosphorothioate linkage
  modified_base 20: mod_base = OTHER; note = 2' O-methyl nucleoside with phosphorothioate linkage
  modified_base 21: mod_base = OTHER; note = 2' O-methyl nucleoside
tatcaaatgaatcttctcatt

SEQ ID NO: 3866 - RNA, 21 nt, synthetic construct
  source 1..21: mol_type = other RNA
  modified_base 1: mod_base = OTHER; note = 2' O-methyl nucleoside with phosphorothioate linkage
  modified_base 2: mod_base = OTHER; note = 2' fluoro-modified nucleoside with phosphorothioate linkage
  modified_base 3: mod_base = OTHER; note = 2' O-methyl nucleoside
  modified_base 4: mod_base = OTHER; note = 2' O-methyl nucleoside
  modified_base 5: mod_base = OTHER; note = 2' O-methyl nucleoside
  modified_base 6: mod_base = OTHER; note = 2' fluoro-modified nucleoside
  modified_base 7: mod_base = OTHER; note = 2' fluoro-modified nucleoside
  modified_base 8: mod_base = OTHER; note = 2' O-methyl nucleoside
  modified_base 9: mod_base = OTHER; note = 2' O-methyl nucleoside
  modified_base 10: mod_base = OTHER; note = 2' O-methyl nucleoside
  modified_base 11: mod_base = OTHER; note = 2' O-methyl nucleoside
  modified_base 12: mod_base = OTHER; note = 2' fluoro-modified nucleoside
  modified_base 13: mod_base = OTHER; note = 2' O-methyl nucleoside
  modified_base 14: mod_base = OTHER; note = 2' fluoro-modified nucleoside
  modified_base 15: mod_base = OTHER; note = 2' O-methyl nucleoside
  modified_base 16: mod_base = OTHER; note = 2' fluoro-modified nucleoside
  modified_base 17: mod_base = OTHER; note = 2' O-methyl nucleoside
  modified_base 18: mod_base = OTHER; note = 2' fluoro-modified nucleoside
  modified_base 19: mod_base = OTHER; note = 2' O-methyl nucleoside with phosphorothioate linkage
  modified_base 20: mod_base = OTHER; note = 2' O-methyl nucleoside with phosphorothioate linkage
  modified_base 21: mod_base = OTHER; note = 2' O-methyl nucleoside
tatcaaatgaatcttctcatt

SEQ ID NO: 3867 - RNA, 21 nt, synthetic construct
  source 1..21: mol_type = other RNA
  modified_base 1: mod_base = OTHER; note = 2' O-methyl nucleoside with phosphorothioate linkage
  modified_base 2: mod_base = OTHER; note = 2' fluoro-modified nucleoside with phosphorothioate linkage
  modified_base 3: mod_base = OTHER; note = 2' O-methyl nucleoside
  modified_base 4: mod_base = OTHER; note = 2' O-methyl nucleoside
  modified_base 5: mod_base = OTHER; note = 2' fluoro-modified nucleoside
  modified_base 6: mod_base = OTHER; note = 2' O-methyl nucleoside
  modified_base 7: mod_base = OTHER; note = 2' fluoro-modified nucleoside
  modified_base 8: mod_base = OTHER; note = 2' O-methyl nucleoside
  modified_base 9: mod_base = OTHER; note = 2' O-methyl nucleoside
  modified_base 10: mod_base = OTHER; note = 2' fluoro-modified nucleoside
  modified_base 11: mod_base = OTHER; note = 2' O-methyl nucleoside
  modified_base 12: mod_base = OTHER; note = 2' fluoro-modified nucleoside
  modified_base 13: mod_base = OTHER; note = 2' O-methyl nucleoside
  modified_base 14: mod_base = OTHER; note = 2' fluoro-modified nucleoside
  modified_base 15: mod_base = OTHER; note = 2' O-methyl nucleoside
  modified_base 16: mod_base = OTHER; note = 2' fluoro-modified nucleoside
  modified_base 17: mod_base = OTHER; note = 2' O-methyl nucleoside
  modified_base 18: mod_base = OTHER; note = 2' fluoro-modified nucleoside
  modified_base 19: mod_base = OTHER; note = 2' O-methyl nucleoside with phosphorothioate linkage
  modified_base 20: mod_base = OTHER; note = 2' O-methyl nucleoside with phosphorothioate linkage
  modified_base 21: mod_base = OTHER; note = 2' O-methyl nucleoside
tatcaaatgaatcttctcatt

SEQ ID NO: 3868 - RNA, 21 nt, synthetic construct
  source 1..21: mol_type = other RNA
  modified_base 1: mod_base = OTHER; note = 2' O-methyl nucleoside with phosphorothioate linkage
  modified_base 2: mod_base = OTHER; note = 2' fluoro-modified nucleoside with phosphorothioate linkage
  modified_base 3: mod_base = OTHER; note = 2' O-methyl nucleoside
  modified_base 4: mod_base = OTHER; note = 2' O-methyl nucleoside
  modified_base 5: mod_base = OTHER; note = 2' fluoro-modified nucleoside
  modified_base 6: mod_base = OTHER; note = 2' O-methyl nucleoside
  modified_base 7: mod_base = OTHER; note = 2' fluoro-modified nucleoside
  modified_base 8: mod_base = OTHER; note = 2' fluoro-modified nucleoside
  modified_base 9: mod_base = OTHER; note = 2' O-methyl nucleoside
  modified_base 10: mod_base = OTHER; note = 2' fluoro-modified nucleoside
  modified_base 11: mod_base = OTHER; note = 2' O-methyl nucleoside
  modified_base 12: mod_base = OTHER; note = 2' fluoro-modified nucleoside
  modified_base 13: mod_base = OTHER; note = 2' O-methyl nucleoside
  modified_base 14: mod_base = OTHER; note = 2' fluoro-modified nucleoside
  modified_base 15: mod_base = OTHER; note = 2' O-methyl nucleoside
  modified_base 16: mod_base = OTHER; note = 2' fluoro-modified nucleoside
  modified_base 17: mod_base = OTHER; note = 2' O-methyl nucleoside
  modified_base 18: mod_base = OTHER; note = 2' fluoro-modified nucleoside
  modified_base 19: mod_base = OTHER; note = 2' O-methyl nucleoside with phosphorothioate linkage
  modified_base 20: mod_base = OTHER; note = 2' O-methyl nucleoside with phosphorothioate linkage
  modified_base 21: mod_base = OTHER; note = 2' O-methyl nucleoside
tatcaaatgaatcttctcatt

SEQ ID NO: 3869 - RNA, 21 nt, synthetic construct
  source 1..21: mol_type = other RNA
  modified_base 1: mod_base = OTHER; note = 2' O-methyl nucleoside with phosphorothioate linkage
  modified_base 2: mod_base = OTHER; note = 2' fluoro-modified nucleoside with phosphorothioate linkage
  modified_base 3: mod_base = OTHER; note = 2' O-methyl nucleoside
  modified_base 4: mod_base = OTHER; note = 2' O-methyl nucleoside
  modified_base 5: mod_base = OTHER; note = 2' fluoro-modified nucleoside
  modified_base 6: mod_base = OTHER; note = 2' O-methyl nucleoside
  modified_base 7: mod_base = OTHER; note = 2' fluoro-modified nucleoside
  modified_base 8: mod_base = OTHER; note = 2' fluoro-modified nucleoside
  modified_base 9: mod_base = OTHER; note = 2' O-methyl nucleoside
  modified_base 10: mod_base = OTHER; note = 2' O-methyl nucleoside
  modified_base 11: mod_base = OTHER; note = 2' O-methyl nucleoside
  modified_base 12: mod_base = OTHER; note = 2' fluoro-modified nucleoside
  modified_base 13: mod_base = OTHER; note = 2' O-methyl nucleoside
  modified_base 14: mod_base = OTHER; note = 2' fluoro-modified nucleoside
  modified_base 15: mod_base = OTHER; note = 2' O-methyl nucleoside
  modified_base 16: mod_base = OTHER; note = 2' fluoro-modified nucleoside
  modified_base 17: mod_base = OTHER; note = 2' O-methyl nucleoside
  modified_base 18: mod_base = OTHER; note = 2' fluoro-modified nucleoside
  modified_base 19: mod_base = OTHER; note = 2' O-methyl nucleoside with phosphorothioate linkage
  modified_base 20: mod_base = OTHER; note = 2' O-methyl nucleoside with phosphorothioate linkage
  modified_base 21: mod_base = OTHER; note = 2' O-methyl nucleoside
tatcaaatgaatcttctcatt

SEQ ID NO: 3870 - RNA, 21 nt, synthetic construct
  source 1..21: mol_type = other RNA
  modified_base 1: mod_base = OTHER; note = 2' O-methyl nucleoside with phosphorothioate linkage
  modified_base 2: mod_base = OTHER; note = 2' fluoro-modified nucleoside with phosphorothioate linkage
  modified_base 3: mod_base = OTHER; note = 2' O-methyl nucleoside
  modified_base 4: mod_base = OTHER; note = 2' O-methyl nucleoside
  modified_base 5: mod_base = OTHER; note = 2' fluoro-modified nucleoside
  modified_base 6: mod_base = OTHER; note = 2' O-methyl nucleoside
  modified_base 7: mod_base = OTHER; note = 2' fluoro-modified nucleoside
  modified_base 8: mod_base = OTHER; note = 2' O-methyl nucleoside
  modified_base 9: mod_base = OTHER; note = 2' O-methyl nucleoside
  modified_base 10: mod_base = OTHER; note = 2' fluoro-modified nucleoside
  modified_base 11: mod_base = OTHER; note = 2' O-methyl nucleoside
  modified_base 12: mod_base = OTHER; note = 2' O-methyl nucleoside
  modified_base 13: mod_base = OTHER; note = 2' O-methyl nucleoside
  modified_base 14: mod_base = OTHER; note = 2' fluoro-modified nucleoside
  modified_base 15: mod_base = OTHER; note = 2' O-methyl nucleoside
  modified_base 16: mod_base = OTHER; note = 2' fluoro-modified nucleoside
  modified_base 17: mod_base = OTHER; note = 2' O-methyl nucleoside
  modified_base 18: mod_base = OTHER; note = 2' fluoro-modified nucleoside
  modified_base 19: mod_base = OTHER; note = 2' O-methyl nucleoside with phosphorothioate linkage
  modified_base 20: mod_base = OTHER; note = 2' O-methyl nucleoside with phosphorothioate linkage
  modified_base 21: mod_base = OTHER; note = 2' O-methyl nucleoside
tatcaaatgaatcttctcatt

SEQ ID NO: 3871 - RNA, 21 nt, synthetic construct
  source 1..21: mol_type = other RNA
  modified_base 1: mod_base = OTHER; note = 2' O-methyl nucleoside with phosphorothioate linkage
  modified_base 2: mod_base = OTHER; note = 2' fluoro-modified nucleoside with phosphorothioate linkage
  modified_base 3: mod_base = OTHER; note = 2' O-methyl nucleoside
  modified_base 4: mod_base = OTHER; note = 2' O-methyl nucleoside
  modified_base 5: mod_base = OTHER; note = 2' O-methyl nucleoside
  modified_base 6: mod_base = OTHER; note = 2' fluoro-modified nucleoside
  modified_base 7: mod_base = OTHER; note = 2' O-methyl nucleoside
  modified_base 8: mod_base = OTHER; note = 2' fluoro-modified nucleoside
  modified_base 9: mod_base = OTHER; note = 2' O-methyl nucleoside
  modified_base 10: mod_base = OTHER; note = 2' fluoro-modified nucleoside
  modified_base 11: mod_base = OTHER; note = 2' O-methyl nucleoside
  modified_base 12: mod_base = OTHER; note = 2' fluoro-modified nucleoside
  modified_base 13: mod_base = OTHER; note = 2' O-methyl nucleoside
  modified_base 14: mod_base = OTHER; note = 2' fluoro-modified nucleoside
  modified_base 15: mod_base = OTHER; note = 2' O-methyl nucleoside
  modified_base 16: mod_base = OTHER; note = 2' fluoro-modified nucleoside
  modified_base 17: mod_base = OTHER; note = 2' O-methyl nucleoside
  modified_base 18: mod_base = OTHER; note = 2' fluoro-modified nucleoside
  modified_base 19: mod_base = OTHER; note = 2' O-methyl nucleoside with phosphorothioate linkage
  modified_base 20: mod_base = OTHER; note = 2' O-methyl nucleoside with phosphorothioate linkage
  modified_base 21: mod_base = OTHER; note = 2' O-methyl nucleoside
ttatcaaatgaatcttctctt

SEQ ID NO: 3872 - RNA, 21 nt, synthetic construct
  source 1..21: mol_type = other RNA
  modified_base 1: mod_base = OTHER; note = 2' O-methyl nucleoside with phosphorothioate linkage
  modified_base 2: mod_base = OTHER; note = 2' fluoro-modified nucleoside with phosphorothioate linkage
  modified_base 3: mod_base = OTHER; note = 2' O-methyl nucleoside
  modified_base 4: mod_base = OTHER; note = 2' O-methyl nucleoside
  modified_base 5: mod_base = OTHER; note = 2' O-methyl nucleoside
  modified_base 6: mod_base = OTHER; note = 2' fluoro-modified nucleoside
  modified_base 7: mod_base = OTHER; note = 2' O-methyl nucleoside
  modified_base 8: mod_base = OTHER; note = 2' O-methyl nucleoside
  modified_base 9: mod_base = OTHER; note = 2' O-methyl nucleoside
  modified_base 10: mod_base = OTHER; note = 2' fluoro-modified nucleoside
  modified_base 11: mod_base = OTHER; note = 2' O-methyl nucleoside
  modified_base 12: mod_base = OTHER; note = 2' fluoro-modified nucleoside
  modified_base 13: mod_base = OTHER; note = 2' O-methyl nucleoside
  modified_base 14: mod_base = OTHER; note = 2' fluoro-modified nucleoside
  modified_base 15: mod_base = OTHER; note = 2' O-methyl nucleoside
  modified_base 16: mod_base = OTHER; note = 2' fluoro-modified nucleoside
  modified_base 17: mod_base = OTHER; note = 2' O-methyl nucleoside
  modified_base 18: mod_base = OTHER; note = 2' fluoro-modified nucleoside
  modified_base 19: mod_base = OTHER; note = 2' O-methyl nucleoside with phosphorothioate linkage
  modified_base 20: mod_base = OTHER; note = 2' O-methyl nucleoside with phosphorothioate linkage
  modified_base 21: mod_base = OTHER; note = 2' O-methyl nucleoside
ttatcaaatgaatcttctctt

SEQ ID NO: 3873 - RNA, 21 nt, synthetic construct
  source 1..21: mol_type = other RNA
  modified_base 1: mod_base = OTHER; note = 2' O-methyl nucleoside with phosphorothioate linkage
  modified_base 2: mod_base = OTHER; note = 2' fluoro-modified nucleoside with phosphorothioate linkage
  modified_base 3: mod_base = OTHER; note = 2' O-methyl nucleoside
  modified_base 4: mod_base = OTHER; note = 2' O-methyl nucleoside
  modified_base 5: mod_base = OTHER; note = 2' O-methyl nucleoside
  modified_base 6: mod_base = OTHER; note = 2' fluoro-modified nucleoside
  modified_base 7: mod_base = OTHER; note = 2' fluoro-modified nucleoside
  modified_base 8: mod_base = OTHER; note = 2' O-methyl nucleoside
  modified_base 9: mod_base = OTHER; note = 2' O-methyl nucleoside
  modified_base 10: mod_base = OTHER; note = 2' fluoro-modified nucleoside
  modified_base 11: mod_base = OTHER; note = 2' O-methyl nucleoside
  modified_base 12: mod_base = OTHER; note = 2' fluoro-modified nucleoside
  modified_base 13: mod_base = OTHER; note = 2' O-methyl nucleoside
  modified_base 14: mod_base = OTHER; note = 2' fluoro-modified nucleoside
  modified_base 15: mod_base = OTHER; note = 2' O-methyl nucleoside
  modified_base 16: mod_base = OTHER; note = 2' fluoro-modified nucleoside
  modified_base 17: mod_base = OTHER; note = 2' O-methyl nucleoside
  modified_base 18: mod_base = OTHER; note = 2' fluoro-modified nucleoside
  modified_base 19: mod_base = OTHER; note = 2' O-methyl nucleoside with phosphorothioate linkage
  modified_base 20: mod_base = OTHER; note = 2' O-methyl nucleoside with phosphorothioate linkage
  modified_base 21: mod_base = OTHER; note = 2' O-methyl nucleoside
ttatcaaatgaatcttctctt

SEQ ID NO: 3874 - RNA, 21 nt, synthetic construct
  source 1..21: mol_type = other RNA
  modified_base 1: mod_base = OTHER; note = 2' O-methyl nucleoside with phosphorothioate linkage
  modified_base 2: mod_base = OTHER; note = 2' fluoro-modified nucleoside with phosphorothioate linkage
  modified_base 3: mod_base = OTHER; note = 2' O-methyl nucleoside
  modified_base 4: mod_base = OTHER; note = 2' O-methyl nucleoside
  modified_base 5: mod_base = OTHER; note = 2' O-methyl nucleoside
  modified_base 6: mod_base = OTHER; note = 2' fluoro-modified nucleoside
  modified_base 7: mod_base = OTHER; note = 2' fluoro-modified nucleoside
  modified_base 8: mod_base = OTHER; note = 2' O-methyl nucleoside
  modified_base 9: mod_base = OTHER; note = 2' O-methyl nucleoside
  modified_base 10: mod_base = OTHER; note = 2' O-methyl nucleoside
  modified_base 11: mod_base = OTHER; note = 2' O-methyl nucleoside
  modified_base 12: mod_base = OTHER; note = 2' fluoro-modified nucleoside
  modified_base 13: mod_base = OTHER; note = 2' O-methyl nucleoside
  modified_base 14: mod_base = OTHER; note = 2' fluoro-modified nucleoside
  modified_base 15: mod_base = OTHER; note = 2' O-methyl nucleoside
  modified_base 16: mod_base = OTHER; note = 2' fluoro-modified nucleoside
  modified_base 17: mod_base = OTHER; note = 2' O-methyl nucleoside
  modified_base 18: mod_base = OTHER; note = 2' fluoro-modified nucleoside
  modified_base 19: mod_base = OTHER; note = 2' O-methyl nucleoside with phosphorothioate linkage
  modified_base 20: mod_base = OTHER; note = 2' O-methyl nucleoside with phosphorothioate linkage
  modified_base 21: mod_base = OTHER; note = 2' O-methyl nucleoside
ttatcaaatgaatcttctctt

SEQ ID NO: 3875 - RNA, 21 nt, synthetic construct
  source 1..21: mol_type = other RNA
  modified_base 1: mod_base = OTHER; note = 2' O-methyl nucleoside with phosphorothioate linkage
  modified_base 2: mod_base = OTHER; note = 2' fluoro-modified nucleoside with phosphorothioate linkage
  modified_base 3: mod_base = OTHER; note = 2' O-methyl nucleoside
  modified_base 4: mod_base = OTHER; note = 2' O-methyl nucleoside
  modified_base 5: mod_base = OTHER; note = 2' fluoro-modified nucleoside
  modified_base 6: mod_base = OTHER; note = 2' O-methyl nucleoside
  modified_base 7: mod_base = OTHER; note = 2' fluoro-modified nucleoside
  modified_base 8: mod_base = OTHER; note = 2' O-methyl nucleoside
  modified_base 9: mod_base = OTHER; note = 2' O-methyl nucleoside
  modified_base 10: mod_base = OTHER; note = 2' fluoro-modified nucleoside
  modified_base 11: mod_base = OTHER; note = 2' O-methyl nucleoside
  modified_base 12: mod_base = OTHER; note = 2' fluoro-modified nucleoside
  modified_base 13: mod_base = OTHER; note = 2' O-methyl nucleoside
  modified_base 14: mod_base = OTHER; note = 2' fluoro-modified nucleoside
  modified_base 15: mod_base = OTHER; note = 2' O-methyl nucleoside
  modified_base 16: mod_base = OTHER; note = 2' fluoro-modified nucleoside
  modified_base 17: mod_base = OTHER; note = 2' O-methyl nucleoside
  modified_base 18: mod_base = OTHER; note = 2' fluoro-modified nucleoside
  modified_base 19: mod_base = OTHER; note = 2' O-methyl nucleoside with phosphorothioate linkage
  modified_base 20: mod_base = OTHER; note = 2' O-methyl nucleoside with phosphorothioate linkage
  modified_base 21: mod_base = OTHER; note = 2' O-methyl nucleoside
ttatcaaatgaatcttctctt

SEQ ID NO: 3876 - RNA, 21 nt, synthetic construct
  source 1..21: mol_type = other RNA
  modified_base 1: mod_base = OTHER; note = 2' O-methyl nucleoside with phosphorothioate linkage
  modified_base 2: mod_base = OTHER; note = 2' fluoro-modified nucleoside with phosphorothioate linkage
  modified_base 3: mod_base = OTHER; note = 2' O-methyl nucleoside
  modified_base 4: mod_base = OTHER; note = 2' O-methyl nucleoside
  modified_base 5: mod_base = OTHER; note = 2' fluoro-modified nucleoside
  modified_base 6: mod_base = OTHER; note = 2' O-methyl nucleoside
  modified_base 7: mod_base = OTHER; note = 2' fluoro-modified nucleoside
  modified_base 8: mod_base = OTHER; note = 2' fluoro-modified nucleoside
  modified_base 9: mod_base = OTHER; note = 2' O-methyl nucleoside
  modified_base 10: mod_base = OTHER; note = 2' O-methyl nucleoside
  modified_base 11: mod_base = OTHER; note = 2' O-methyl nucleoside
  modified_base 12: mod_base = OTHER; note = 2' fluoro-modified nucleoside
  modified_base 13: mod_base = OTHER; note = 2' O-methyl nucleoside
  modified_base 14: mod_base = OTHER; note = 2' fluoro-modified nucleoside
  modified_base 15: mod_base = OTHER; note = 2' O-methyl nucleoside
  modified_base 16: mod_base = OTHER; note = 2' fluoro-modified nucleoside
  modified_base 17: mod_base = OTHER; note = 2' O-methyl nucleoside
  modified_base 18: mod_base = OTHER; note = 2' fluoro-modified nucleoside
  modified_base 19: mod_base = OTHER; note = 2' O-methyl nucleoside with phosphorothioate linkage
  modified_base 20: mod_base = OTHER; note = 2' O-methyl nucleoside with phosphorothioate linkage
  modified_base 21: mod_base = OTHER; note = 2' O-methyl nucleoside
ttatcaaatgaatcttctctt

SEQ ID NO: 3877 - RNA, 21 nt, synthetic construct
  source 1..21: mol_type = other RNA
  modified_base 1: mod_base = OTHER; note = 2' O-methyl nucleoside with phosphorothioate linkage
  modified_base 2: mod_base = OTHER; note = 2' fluoro-modified nucleoside with phosphorothioate linkage
  modified_base 3: mod_base = OTHER; note = 2' O-methyl nucleoside
  modified_base 4: mod_base = OTHER; note = 2' O-methyl nucleoside
  modified_base 5: mod_base = OTHER; note = 2' fluoro-modified nucleoside
  modified_base 6: mod_base = OTHER; note = 2' O-methyl nucleoside
  modified_base 7: mod_base = OTHER; note = 2' fluoro-modified nucleoside
  modified_base 8: mod_base = OTHER; note = 2' fluoro-modified nucleoside
  modified_base 9: mod_base = OTHER; note = 2' O-methyl nucleoside
  modified_base 10: mod_base = OTHER; note = 2' fluoro-modified nucleoside
  modified_base 11: mod_base = OTHER; note = 2' O-methyl nucleoside
  modified_base 12: mod_base = OTHER; note = 2' O-methyl nucleoside
  modified_base 13: mod_base = OTHER; note = 2' O-methyl nucleoside
  modified_base 14: mod_base = OTHER; note = 2' fluoro-modified nucleoside
  modified_base 15: mod_base = OTHER; note = 2' O-methyl nucleoside
  modified_base 16: mod_base = OTHER; note = 2' fluoro-modified nucleoside
  modified_base 17: mod_base = OTHER; note = 2' O-methyl nucleoside
  modified_base 18: mod_base = OTHER; note = 2' fluoro-modified nucleoside
  modified_base 19: mod_base = OTHER; note = 2' O-methyl nucleoside with phosphorothioate linkage
  modified_base 20: mod_base = OTHER; note = 2' O-methyl nucleoside with phosphorothioate linkage
  modified_base 21: mod_base = OTHER; note = 2' O-methyl nucleoside
ttatcaaatgaatcttctctt

SEQ ID NO: 3878 - RNA, 21 nt, synthetic construct
  source 1..21: mol_type = other RNA
  modified_base 1: mod_base = OTHER; note = 2' O-methyl nucleoside with phosphorothioate linkage
  modified_base 2: mod_base = OTHER; note = 2' fluoro-modified nucleoside with phosphorothioate linkage
  modified_base 3: mod_base = OTHER; note = 2' O-methyl nucleoside
  modified_base 4: mod_base = OTHER; note = 2' O-methyl nucleoside
  modified_base 5: mod_base = OTHER; note = 2' fluoro-modified nucleoside
  modified_base 6: mod_base = OTHER; note = 2' O-methyl nucleoside
  modified_base 7: mod_base = OTHER; note = 2' fluoro-modified nucleoside
  modified_base 8: mod_base = OTHER; note = 2' O-methyl nucleoside
  modified_base 9: mod_base = OTHER; note = 2' O-methyl nucleoside
  modified_base 10: mod_base = OTHER; note = 2' fluoro-modified nucleoside
  modified_base 11: mod_base = OTHER; note = 2' O-methyl nucleoside
  modified_base 12: mod_base = OTHER; note = 2' O-methyl nucleoside
  modified_base 13: mod_base = OTHER; note = 2' O-methyl nucleoside
  modified_base 14: mod_base = OTHER; note = 2' fluoro-modified nucleoside
  modified_base 15: mod_base = OTHER; note = 2' O-methyl nucleoside
  modified_base 16: mod_base = OTHER; note = 2' fluoro-modified nucleoside
  modified_base 17: mod_base = OTHER; note = 2' O-methyl nucleoside
  modified_base 18: mod_base = OTHER; note = 2' fluoro-modified nucleoside
  modified_base 19: mod_base = OTHER; note = 2' O-methyl nucleoside with phosphorothioate linkage
  modified_base 20: mod_base = OTHER; note = 2' O-methyl nucleoside with phosphorothioate linkage
  modified_base 21: mod_base = OTHER; note = 2' O-methyl nucleoside
ttatcaaatgaatcttctctt

SEQ ID NO: 3879 - RNA, 21 nt, synthetic construct
  source 1..21: mol_type = other RNA
cagacatcatgagttggtatt

SEQ ID NO: 3880 - RNA, 21 nt, synthetic construct
  source 1..21: mol_type = other RNA
tgctaccagagacaactgatt

SEQ ID NO: 3881 - RNA, 21 nt, synthetic construct
  source 1..21: mol_type = other RNA
ttagatgaaagattcggtatt

SEQ ID NO: 3882 - RNA, 21 nt, synthetic construct
  source 1..21: mol_type = other RNA
gtctggaaatggatggacatt

SEQ ID NO: 3883 - RNA, 21 nt, synthetic construct
  source 1..21: mol_type = other RNA
tctgtctcctactggcacatt

SEQ ID NO: 3884 - RNA, 21 nt, synthetic construct
  source 1..21: mol_type = other RNA
tcctactggcacaacagaatt

SEQ ID NO: 3885 - RNA, 21 nt, synthetic construct
  source 1..21: mol_type = other RNA
ctgggaaatgagaagattatt

SEQ ID NO: 3886 - RNA, 21 nt, synthetic construct
  source 1..21: mol_type = other RNA
gggaaatgagaagattcaatt

SEQ ID NO: 3887 - RNA, 21 nt, synthetic construct
  source 1..21: mol_type = other RNA
tgagaagattcatttgatatt

SEQ ID NO: 3888 - RNA, 21 nt, synthetic construct
  source 1..21: mol_type = other RNA
gagaagattcatttgataatt

SEQ ID NO: 3889 - RNA, 21 nt, synthetic construct
  source 1..21: mol_type = other RNA
tggcatgcagttcagtacatt

SEQ ID NO: 3890 - RNA, 21 nt, synthetic construct
  source 1..21: mol_type = other RNA
catgcagttcagtacctgatt

SEQ ID NO: 3891 - RNA, 21 nt, synthetic construct
  source 1..21: mol_type = other RNA
tgcagttcagtacctgggatt

SEQ ID NO: 3892 - RNA, 21 nt, synthetic construct
  source 1..21: mol_type = other RNA
cagttcagtacctgggacatt

SEQ ID NO: 3893 - RNA, 21 nt, synthetic construct
  source 1..21: mol_type = other RNA
agttcagtacctgggacaatt

SEQ ID NO: 3894 - RNA, 21 nt, synthetic construct
  source 1..21: mol_type = other RNA
tacctgggacaatgacaaatt

SEQ ID NO: 3895 - RNA, 21 nt, synthetic construct
  source 1..21: mol_type = other RNA
tgacaatgataagtttgaatt

SEQ ID NO: 3896 - RNA, 21 nt, synthetic construct
  source 1..21: mol_type = other RNA
aagtttgaaggcaactgtatt

SEQ ID NO: 3897 - RNA, 21 nt, synthetic construct
  source 1..21: mol_type = other RNA
cacttactcaaaagcatcatt

SEQ ID NO: 3898 - RNA, 21 nt, synthetic construct
  source 1..21: mol_type = other RNA
catctactcctaatggttatt

SEQ ID NO: 3899 - RNA, 19 nt, synthetic construct
  source 1..19: mol_type = other RNA
cagacatcatgagttggta

SEQ ID NO: 3900 - RNA, 19 nt, synthetic construct
  source 1..19: mol_type = other RNA
tgctaccagagacaactga

SEQ ID NO: 3901 - RNA, 19 nt, synthetic construct
  source 1..19: mol_type = other RNA
ttagatgaaagattcggta

SEQ ID NO: 3902 - RNA, 19 nt, synthetic construct
  source 1..19: mol_type = other RNA
gtctggaaatggatggaca

SEQ ID NO: 3903 - RNA, 19 nt, synthetic construct
  source 1..19: mol_type = other RNA
tctgtctcctactggcaca

SEQ ID NO: 3904 - RNA, 19 nt, synthetic construct
  source 1..19: mol_type = other RNA
tcctactggcacaacagaa

SEQ ID NO: 3905 - RNA, 19 nt, synthetic construct
  source 1..19: mol_type = other RNA
ctgggaaatgagaagatta

SEQ ID NO: 3906 - RNA, 19 nt, synthetic construct
  source 1..19: mol_type = other RNA
gggaaatgagaagattcaa

SEQ ID NO: 3907 - RNA, 19 nt, synthetic construct
  source 1..19: mol_type = other RNA
tgagaagattcatttgata

SEQ ID NO: 3908 - RNA, 19 nt, synthetic construct
  source 1..19: mol_type = other RNA
gagaagattcatttgataa

SEQ ID NO: 3909 - RNA, 19 nt, synthetic construct
  source 1..19: mol_type = other RNA
tggcatgcagttcagtaca

SEQ ID NO: 3910 - RNA, 19 nt, synthetic construct
  source 1..19: mol_type = other RNA
catgcagttcagtacctga

SEQ ID NO: 3911 - RNA, 19 nt, synthetic construct
  source 1..19: mol_type = other RNA
tgcagttcagtacctggga

SEQ ID NO: 3912 - RNA, 19 nt, synthetic construct
  source 1..19: mol_type = other RNA
cagttcagtacctgggaca

SEQ ID NO: 3913 - RNA, 19 nt, synthetic construct
  source 1..19: mol_type = other RNA
agttcagtacctgggacaa

SEQ ID NO: 3914 - RNA, 19 nt, synthetic construct
  source 1..19: mol_type = other RNA
tacctgggacaatgacaaa

SEQ ID NO: 3915 - RNA, 19 nt, synthetic construct
  source 1..19: mol_type = other RNA
tgacaatgataagtttgaa

SEQ ID NO: 3916 - RNA, 19 nt, synthetic construct
  source 1..19: mol_type = other RNA
aagtttgaaggcaactgta

SEQ ID NO: 3917 - RNA, 19 nt, synthetic construct
  source 1..19: mol_type = other RNA
cacttactcaaaagcatca

SEQ ID NO: 3918 - RNA, 19 nt, synthetic construct
  source 1..19: mol_type = other RNA
catctactcctaatggtta

SEQ ID NO: 3919 - RNA, 18 nt, synthetic construct
  source 1..18: mol_type = other RNA
cagacatcatgagttggt

SEQ ID NO: 3920 - RNA, 18 nt, synthetic construct
  source 1..18: mol_type = other RNA
tgctaccagagacaactg

SEQ ID NO: 3921 - RNA, 18 nt, synthetic construct
  source 1..18: mol_type = other RNA
ttagatgaaagattcggt

SEQ ID NO: 3922 - RNA, 18 nt, synthetic construct
  source 1..18: mol_type = other RNA
gtctggaaatggatggac

SEQ ID NO: 3923 - RNA, 18 nt, synthetic construct
  source 1..18: mol_type = other RNA
tctgtctcctactggcac

SEQ ID NO: 3924 - RNA, 18 nt, synthetic construct
  source 1..18: mol_type = other RNA
tcctactggcacaacaga

SEQ ID NO: 3925 - RNA, 18 nt, synthetic construct
  source 1..18: mol_type = other RNA
ctgggaaatgagaagatt

SEQ ID NO: 3926 - RNA, 18 nt, synthetic construct
  source 1..18: mol_type = other RNA
gggaaatgagaagattca

SEQ ID NO: 3927 - RNA, 18 nt, synthetic construct
  source 1..18: mol_type = other RNA
tgagaagattcatttgat

SEQ ID NO: 3928 - RNA, 18 nt, synthetic construct
  source 1..18: mol_type = other RNA
gagaagattcatttgata

SEQ ID NO: 3929 - RNA, 18 nt, synthetic construct
  source 1..18: mol_type = other RNA
tggcatgcagttcagtac

SEQ ID NO: 3930 - RNA, 18 nt, synthetic construct
  source 1..18: mol_type = other RNA
catgcagttcagtacctg

SEQ ID NO: 3931 - RNA, 18 nt, synthetic construct
  source 1..18: mol_type = other RNA
tgcagttcagtacctggg

SEQ ID NO: 3932 - RNA, 18 nt, synthetic construct
  source 1..18: mol_type = other RNA
cagttcagtacctgggac

SEQ ID NO: 3933 - RNA, 18 nt, synthetic construct
  source 1..18: mol_type = other RNA
agttcagtacctgggaca

SEQ ID NO: 3934 - RNA, 18 nt, synthetic construct
  source 1..18: mol_type = other RNA
tacctgggacaatgacaa

SEQ ID NO: 3935 - RNA, 18 nt, synthetic construct
  source 1..18: mol_type = other RNA
tgacaatgataagtttga

SEQ ID NO: 3936 - RNA, 18 nt, synthetic construct
  source 1..18: mol_type = other RNA
aagtttgaaggcaactgt

SEQ ID NO: 3937 - RNA, 18 nt, synthetic construct
  source 1..18: mol_type = other RNA
cacttactcaaaagcatc

SEQ ID NO: 3938 - RNA, 18 nt, synthetic construct
  source 1..18: mol_type = other RNA
catctactcctaatggtt

SEQ ID NO: 3939 - RNA, 21 nt, synthetic construct
  source 1..21: mol_type = other RNA
  modified_base 14: mod_base = OTHER; note = Thymine
cagacatcatgagttggtatt

SEQ ID NO: 3940 - RNA, 19 nt, synthetic construct
  source 1..19: mol_type = other RNA
  modified_base 14: mod_base = OTHER; note = Thymine
cagacatcatgagttggta

SEQ ID NO: 3941 - RNA, 19 nt, synthetic construct
  source 1..19: mol_type = other RNA
  modified_base 14: mod_base = OTHER; note = Thymine
cagacatcatgagttggta

SEQ ID NO: 3942 - RNA, 21 nt, synthetic construct
  source 1..21: mol_type = other RNA
taccaactcatgatgtctgtt

SEQ ID NO: 3943 - RNA, 21 nt, synthetic construct
  source 1..21: mol_type = other RNA
tcagttgtctctggtagcatt

SEQ ID NO: 3944 - RNA, 21 nt, synthetic construct
  source 1..21: mol_type = other RNA
taccgaatctttcatctaatt

SEQ ID NO: 3945 - RNA, 21 nt, synthetic construct
  source 1..21: mol_type = other RNA
tgtccatccatttccagactt

SEQ ID NO: 3946 - RNA, 21 nt, synthetic construct
  source 1..21: mol_type = other RNA
tgtgccagtaggagacagatt

SEQ ID NO: 3947 - RNA, 21 nt, synthetic construct
  source 1..21: mol_type = other RNA
ttctgttgtgccagtaggatt

SEQ ID NO: 3948 - RNA, 21 nt, synthetic construct
  source 1..21: mol_type = other RNA
taatcttctcatttcccagtt

SEQ ID NO: 3949 - RNA, 21 nt, synthetic construct
  source 1..21: mol_type = other RNA
ttgaatcttctcatttccctt

SEQ ID NO: 3950 - RNA, 21 nt, synthetic construct
  source 1..21: mol_type = other RNA
tatcaaatgaatcttctcatt

SEQ ID NO: 3951 - RNA, 21 nt, synthetic construct
  source 1..21: mol_type = other RNA
ttatcaaatgaatcttctctt

SEQ ID NO: 3952 - RNA, 21 nt, synthetic construct
  source 1..21: mol_type = other RNA
tgtactgaactgcatgccatt

SEQ ID NO: 3953 - RNA, 21 nt, synthetic construct
  source 1..21: mol_type = other RNA
tcaggtactgaactgcatgtt

SEQ ID NO: 3954 - RNA, 21 nt, synthetic construct
  source 1..21: mol_type = other RNA
tcccaggtactgaactgcatt

SEQ ID NO: 3955 - RNA, 21 nt, synthetic construct
  source 1..21: mol_type = other RNA
tgtcccaggtactgaactgtt

SEQ ID NO: 3956 - RNA, 21 nt, synthetic construct
  source 1..21: mol_type = other RNA
ttgtcccaggtactgaacttt

SEQ ID NO: 3957 - RNA, 21 nt, synthetic construct
  source 1..21: mol_type = other RNA
tttgtcattgtcccaggtatt

SEQ ID NO: 3958 - RNA, 21 nt, synthetic construct
  source 1..21: mol_type = other RNA
ttcaaacttatcattgtcatt

SEQ ID NO: 3959 - RNA, 21 nt, synthetic construct
  source 1..21: mol_type = other RNA
tacagttgccttcaaactttt

SEQ ID NO: 3960 - RNA, 21 nt, synthetic construct
  source 1..21: mol_type = other RNA
tgatgcttttgagtaagtgtt

SEQ ID NO: 3961 - RNA, 21 nt, synthetic construct
  source 1..21: mol_type = other RNA
taaccattaggagtagatgtt

SEQ ID NO: 3962 - RNA, 19 nt, synthetic construct
  source 1..19: mol_type = other RNA
tgatgtgaaaaacttgtca

SEQ ID NO: 3963 - RNA, 19 nt, synthetic construct
  source 1..19: mol_type = other RNA
taccaactcatgatgtctg

SEQ ID NO: 3964 - RNA, 19 nt, synthetic construct
  source 1..19: mol_type = other RNA
tcagttgtctctggtagca

SEQ ID NO: 3965 - RNA, 19 nt, synthetic construct
  source 1..19: mol_type = other RNA
taccgaatctttcatctaa

SEQ ID NO: 3966 - RNA, 19 nt, synthetic construct
  source 1..19: mol_type = other RNA
tgtccatccatttccagac

SEQ ID NO: 3967 - RNA, 19 nt, synthetic construct
  source 1..19: mol_type = other RNA
tgtgccagtaggagacaga

SEQ ID NO: 3968 - RNA, 19 nt, synthetic construct
  source 1..19: mol_type = other RNA
ttctgttgtgccagtagga

SEQ ID NO: 3969 - RNA, 19 nt, synthetic construct
  source 1..19: mol_type = other RNA
taatcttctcatttcccag

SEQ ID NO: 3970 - RNA, 19 nt, synthetic construct
  source 1..19: mol_type = other RNA
ttgaatcttctcatttccc

SEQ ID NO: 3971 - RNA, 19 nt, synthetic construct
  source 1..19: mol_type = other RNA
tatcaaatgaatcttctca

SEQ ID NO: 3972 - RNA, 19 nt, synthetic construct
  source 1..19: mol_type = other RNA
ttatcaaatgaatcttctc

SEQ ID NO: 3973 - RNA, 19 nt, synthetic construct
  source 1..19: mol_type = other RNA
tgtactgaactgcatgcca

SEQ ID NO: 3974 - RNA, 19 nt, synthetic construct
  source 1..19: mol_type = other RNA
tcaggtactgaactgcatg

SEQ ID NO: 3975 - RNA, 19 nt, synthetic construct
  source 1..19: mol_type = other RNA
tcccaggtactgaactgca

SEQ ID NO: 3976 - RNA, 19 nt, synthetic construct
  source 1..19: mol_type = other RNA
tgtcccaggtactgaactg

SEQ ID NO: 3977 - RNA, 19 nt, synthetic construct
  source 1..19: mol_type = other RNA
ttgtcccaggtactgaact

SEQ ID NO: 3978 - RNA, 19 nt, synthetic construct
  source 1..19: mol_type = other RNA
tttgtcattgtcccaggta

SEQ ID NO: 3979 - RNA, 19 nt, synthetic construct
  source 1..19: mol_type = other RNA
ttcaaacttatcattgtca

SEQ ID NO: 3980 - RNA, 19 nt, synthetic construct
  source 1..19: mol_type = other RNA
tacagttgccttcaaactt

SEQ ID NO: 3981 - RNA, 19 nt, synthetic construct
  source 1..19: mol_type = other RNA
tgatgcttttgagtaagtg

SEQ ID NO: 3982 - RNA, 19 nt, synthetic construct
  source 1..19: mol_type = other RNA
taaccattaggagtagatg

SEQ ID NO: 3983 - RNA, 18 nt, synthetic construct
  source 1..18: mol_type = other RNA
accaactcatgatgtctg

SEQ ID NO: 3984 - RNA, 18 nt, synthetic construct
  source 1..18: mol_type = other RNA
cagttgtctctggtagca

SEQ ID NO: 3985 - RNA, 18 nt, synthetic construct
  source 1..18: mol_type = other RNA
accgaatctttcatctaa

SEQ ID NO: 3986 - RNA, 18 nt, synthetic construct
  source 1..18: mol_type = other RNA
gtccatccatttccagac

SEQ ID NO: 3987 - RNA, 18 nt, synthetic construct
  source 1..18: mol_type = other RNA
gtgccagtaggagacaga

SEQ ID NO: 3988 - RNA, 18 nt, synthetic construct
  source 1..18: mol_type = other RNA
tctgttgtgccagtagga

SEQ ID NO: 3989 - RNA, 18 nt, synthetic construct
  source 1..18: mol_type = other RNA
aatcttctcatttcccag

SEQ ID NO: 3990 - RNA, 18 nt, synthetic construct
  source 1..18: mol_type = other RNA
tgaatcttctcatttccc

SEQ ID NO: 3991 - RNA, 18 nt, synthetic construct
  source 1..18: mol_type = other RNA
atcaaatgaatcttctca

SEQ ID NO: 3992 - RNA, 18 nt, synthetic construct
  source 1..18: mol_type = other RNA
tatcaaatgaatcttctc

SEQ ID NO: 3993 - RNA, 18 nt, synthetic construct
  source 1..18: mol_type = other RNA
gtactgaactgcatgcca

SEQ ID NO: 3994 - RNA, 18 nt, synthetic construct
  source 1..18: mol_type = other RNA
caggtactgaactgcatg

SEQ ID NO: 3995 - RNA, 18 nt, synthetic construct
  source 1..18: mol_type = other RNA
cccaggtactgaactgca

SEQ ID NO: 3996 - RNA, 18 nt, synthetic construct
  source 1..18: mol_type = other RNA
gtcccaggtactgaactg

SEQ ID NO: 3997 - RNA, 18 nt, synthetic construct
  source 1..18: mol_type = other RNA
tgtcccaggtactgaact

SEQ ID NO: 3998 - RNA, 18 nt, synthetic construct
  source 1..18: mol_type = other RNA
ttgtcattgtcccaggta

SEQ ID NO: 3999 - RNA, 18 nt, synthetic construct
  source 1..18: mol_type = other RNA
tcaaacttatcattgtca

SEQ ID NO: 4000 - RNA, 18 nt, synthetic construct
  source 1..18: mol_type = other RNA
acagttgccttcaaactt

SEQ ID NO: 4001 - RNA, 18 nt, synthetic construct
  source 1..18: mol_type = other RNA
gatgcttttgagtaagtg

SEQ ID NO: 4002 - RNA, 18 nt, synthetic construct
  source 1..18: mol_type = other RNA
aaccattaggagtagatg

SEQ ID NO: 4003 - RNA, 21 nt, synthetic construct
  source 1..21: mol_type = other RNA
  modified_base 1: mod_base = OTHER; note = 2' O-methyl nucleoside with phosphorothioate linkage
  modified_base 2: mod_base = OTHER; note = 2' fluoro-modified nucleoside with phosphorothioate linkage
  modified_base 3: mod_base = OTHER; note = 2' O-methyl nucleoside
  modified_base 4: mod_base = OTHER; note = 2' fluoro-modified nucleoside
  modified_base 5: mod_base = OTHER; note = 2' O-methyl nucleoside
  modified_base 6: mod_base = OTHER; note = 2' fluoro-modified nucleoside
  modified_base 7: mod_base = OTHER; note = 2' O-methyl nucleoside
  modified_base 8: mod_base = OTHER; note = 2' fluoro-modified nucleoside
  modified_base 9: mod_base = OTHER; note = 2' O-methyl nucleoside
  modified_base 10: mod_base = OTHER; note = 2' fluoro-modified nucleoside
  modified_base 11: mod_base = OTHER; note = 2' O-methyl nucleoside
  modified_base 12: mod_base = OTHER; note = 2' fluoro-modified nucleoside
  modified_base 13: mod_base = OTHER; note = 2' O-methyl nucleoside
  modified_base 14: mod_base = OTHER; note = 2' fluoro-modified nucleoside
  modified_base 15: mod_base = OTHER; note = 2' O-methyl nucleoside
  modified_base 16: mod_base = OTHER; note = 2' fluoro-modified nucleoside
  modified_base 17: mod_base = OTHER; note = 2' O-methyl nucleoside
  modified_base 18: mod_base = OTHER; note = 2' fluoro-modified nucleoside
  modified_base 19: mod_base = OTHER; note = 2' O-methyl nucleoside with phosphorothioate linkage
  modified_base 20: mod_base = OTHER; note = 2' O-methyl nucleoside with phosphorothioate linkage
  modified_base 21: mod_base = OTHER; note = 2' O-methyl nucleoside
taccaactcatgatgtctgtt

SEQ ID NO: 4004 - RNA, 21 nt, synthetic construct
  source 1..21: mol_type = other RNA
  modified_base 1: mod_base = OTHER; note = 2' O-methyl nucleoside with phosphorothioate linkage
  modified_base 2: mod_base = OTHER; note = 2' fluoro-modified nucleoside with phosphorothioate linkage
  modified_base 3: mod_base = OTHER; note = 2' O-methyl nucleoside
  modified_base 4: mod_base = OTHER; note = 2' O-methyl nucleoside
  modified_base 5: mod_base = OTHER; note = 2' O-methyl nucleoside
  modified_base 6: mod_base = OTHER; note = 2' fluoro-modified nucleoside
  modified_base 7: mod_base = OTHER; note = 2' O-methyl nucleoside
  modified_base 8: mod_base = OTHER; note = 2' fluoro-modified nucleoside
  modified_base 9: mod_base = OTHER; note = 2' O-methyl nucleoside
  modified_base 10: mod_base = OTHER; note = 2' fluoro-modified nucleoside
  modified_base 11: mod_base = OTHER; note = 2' O-methyl nucleoside
  modified_base 12: mod_base = OTHER; note = 2' fluoro-modified nucleoside
  modified_base 13: mod_base = OTHER; note = 2' O-methyl nucleoside
  modified_base 14: mod_base = OTHER; note = 2' fluoro-modified nucleoside
  modified_base 15: mod_base = OTHER; note = 2' O-methyl nucleoside
  modified_base 16: mod_base = OTHER; note = 2' fluoro-modified nucleoside
  modified_base 17: mod_base = OTHER; note = 2' O-methyl nucleoside
  modified_base 18: mod_base = OTHER; note = 2' fluoro-modified nucleoside
  modified_base 19: mod_base = OTHER; note = 2' O-methyl nucleoside with phosphorothioate linkage
  modified_base 20: mod_base = OTHER; note = 2' O-methyl nucleoside with phosphorothioate linkage
  modified_base 21: mod_base = OTHER; note = 2' O-methyl nucleoside
taccaactcatgatgtctgtt

SEQ ID NO: 4005 - RNA, 21 nt, synthetic construct
  source 1..21: mol_type = other RNA
  modified_base 1: mod_base = OTHER; note = 2' O-methyl nucleoside with phosphorothioate linkage
  modified_base 2: mod_base = OTHER; note = 2' fluoro-modified nucleoside with phosphorothioate linkage
  modified_base 3: mod_base = OTHER; note = 2' O-methyl nucleoside
  modified_base 4: mod_base = OTHER; note = 2' O-methyl nucleoside
  modified_base 5: mod_base = OTHER; note = 2' O-methyl nucleoside
  modified_base 6: mod_base = OTHER; note = 2' fluoro-modified nucleoside
  modified_base 7: mod_base = OTHER; note = 2' fluoro-modified nucleoside
  modified_base 8: mod_base = OTHER; note = 2' O-methyl nucleoside
  modified_base 9: mod_base = OTHER; note = 2' O-methyl nucleoside
  modified_base 10: mod_base = OTHER; note = 2' fluoro-modified nucleoside
  modified_base 11: mod_base = OTHER; note = 2' O-methyl nucleoside
  modified_base 12: mod_base = OTHER; note = 2' fluoro-modified nucleoside
  modified_base 13: mod_base = OTHER; note = 2' O-methyl nucleoside
  modified_base 14: mod_base = OTHER; note = 2' fluoro-modified nucleoside
  modified_base 15: mod_base = OTHER; note = 2' O-methyl nucleoside
  modified_base 16: mod_base = OTHER; note = 2' fluoro-modified nucleoside
  modified_base 17: mod_base = OTHER; note = 2' O-methyl nucleoside
  modified_base 18: mod_base = OTHER; note = 2' fluoro-modified nucleoside
  modified_base 19: mod_base = OTHER; note = 2' O-methyl nucleoside with phosphorothioate linkage
  modified_base 20: mod_base = OTHER; note = 2' O-methyl nucleoside with phosphorothioate linkage
  modified_base 21: mod_base = OTHER; note = 2' O-methyl nucleoside
taccaactcatgatgtctgtt

SEQ ID NO: 4006 - RNA, 21 nt, synthetic construct
  source 1..21: mol_type = other RNA
  modified_base 1: mod_base = OTHER; note = 2' O-methyl nucleoside with phosphorothioate linkage
  modified_base 2: mod_base = OTHER; note = 2' fluoro-modified nucleoside with phosphorothioate linkage
  modified_base 3: mod_base = OTHER; note = 2' O-methyl nucleoside
  modified_base 4: mod_base = OTHER; note = 2' O-methyl nucleoside
  modified_base 5: mod_base = OTHER; note = 2' O-methyl nucleoside
  modified_base 6: mod_base = OTHER; note = 2' fluoro-modified nucleoside
  modified_base 7: mod_base = OTHER; note = 2' fluoro-modified nucleoside
  modified_base 8: mod_base = OTHER; note = 2' O-methyl nucleoside
  modified_base 9: mod_base = OTHER; note = 2' O-methyl nucleoside
  modified_base 10: mod_base = OTHER; note = 2' O-methyl nucleoside
  modified_base 11: mod_base = OTHER; note = 2' O-methyl nucleoside
  modified_base 12: mod_base = OTHER; note = 2' fluoro-modified nucleoside
  modified_base 13: mod_base = OTHER; note = 2' O-methyl nucleoside
  modified_base 14: mod_base = OTHER; note = 2' fluoro-modified nucleoside
  modified_base 15: mod_base = OTHER; note = 2' O-methyl nucleoside
  modified_base 16: mod_base = OTHER; note = 2' fluoro-modified nucleoside
  modified_base 17: mod_base = OTHER; note = 2' O-methyl nucleoside
  modified_base 18: mod_base = OTHER; note = 2' fluoro-modified nucleoside
  modified_base 19: mod_base = OTHER; note = 2' O-methyl nucleoside with phosphorothioate linkage
  modified_base 20: mod_base = OTHER; note = 2' O-methyl nucleoside with phosphorothioate linkage
  modified_base 21: mod_base = OTHER; note = 2' O-methyl nucleoside
taccaactcatgatgtctgtt

SEQ ID NO: 4007 - RNA, 21 nt, synthetic construct
  source 1..21: mol_type = other RNA
  modified_base 1: mod_base = OTHER; note = 2' O-methyl nucleoside with phosphorothioate linkage
  modified_base 2: mod_base = OTHER; note = 2' fluoro-modified nucleoside with phosphorothioate linkage
  modified_base 3: mod_base = OTHER; note = 2' O-methyl nucleoside
  modified_base 4: mod_base = OTHER; note = 2' O-methyl nucleoside
  modified_base 5: mod_base = OTHER; note = 2' O-methyl nucleoside
  modified_base 6: mod_base = OTHER; note = 2' O-methyl nucleoside
  modified_base 7: mod_base = OTHER; note = 2' fluoro-modified nucleoside
  modified_base 8: mod_base = OTHER; note = 2' O-methyl nucleoside
  modified_base 9: mod_base = OTHER; note = 2' O-methyl nucleoside
  modified_base 10: mod_base = OTHER; note = 2' O-methyl nucleoside
  modified_base 11: mod_base = OTHER; note = 2' O-methyl nucleoside
  modified_base 12: mod_base = OTHER; note = 2' fluoro-modified nucleoside
  modified_base 13: mod_base = OTHER; note = 2' O-methyl nucleoside
  modified_base 14: mod_base = OTHER; note = 2' fluoro-modified nucleoside
  modified_base 15: mod_base = OTHER; note = 2' O-methyl nucleoside
  modified_base 16: mod_base = OTHER; note = 2' fluoro-modified nucleoside
  modified_base 17: mod_base = OTHER; note = 2' O-methyl nucleoside
  modified_base 18: mod_base = OTHER; note = 2' fluoro-modified nucleoside
  modified_base 19: mod_base = OTHER; note = 2' O-methyl nucleoside with phosphorothioate linkage
  modified_base 20: mod_base = OTHER; note = 2' O-methyl nucleoside with phosphorothioate linkage
  modified_base 21: mod_base = OTHER; note = 2' O-methyl nucleoside
taccaactcatgatgtctgtt

SEQ ID NO: 4008 - RNA, 21 nt, synthetic construct
  source 1..21: mol_type = other RNA
  modified_base 1: mod_base = OTHER; note = 2' O-methyl nucleoside with phosphorothioate linkage
  modified_base 2: mod_base = OTHER; note = 2' fluoro-modified nucleoside with phosphorothioate linkage
  modified_base 3: mod_base = OTHER; note = 2' O-methyl nucleoside
  modified_base 4: mod_base = OTHER; note = 2' O-methyl nucleoside
  modified_base 5: mod_base = OTHER; note = 2' fluoro-modified nucleoside
  modified_base 6: mod_base = OTHER; note = 2' O-methyl nucleoside
  modified_base 7: mod_base = OTHER; note = 2' fluoro-modified nucleoside
  modified_base 8: mod_base = OTHER; note = 2' O-methyl nucleoside
  modified_base 9: mod_base = OTHER; note = 2' fluoro-modified nucleoside
  modified_base 10: mod_base = OTHER; note = 2' O-methyl nucleoside
  modified_base 11: mod_base = OTHER; note = 2' O-methyl nucleoside
  modified_base 12: mod_base = OTHER; note = 2' fluoro-modified nucleoside
  modified_base 13: mod_base = OTHER; note = 2' O-methyl nucleoside
  modified_base 14: mod_base = OTHER; note = 2' fluoro-modified nucleoside
  modified_base 15: mod_base = OTHER; note = 2' O-methyl nucleoside
  modified_base 16: mod_base = OTHER; note = 2' fluoro-modified nucleoside
  modified_base 17: mod_base = OTHER; note = 2' O-methyl nucleoside
  modified_base 18: mod_base = OTHER; note = 2' fluoro-modified nucleoside
  modified_base 19: mod_base = OTHER; note = 2' O-methyl nucleoside with phosphorothioate linkage
  modified_base 20: mod_base = OTHER; note = 2' O-methyl nucleoside with phosphorothioate linkage
  modified_base 21: mod_base = OTHER; note = 2' O-methyl nucleoside
taccaactcatgatgtctgtt

SEQ ID NO: 4009 - RNA, 21 nt, synthetic construct
  source 1..21: mol_type = other RNA
  modified_base 1: mod_base = OTHER; note = 2' O-methyl nucleoside with phosphorothioate linkage
  modified_base 2: mod_base = OTHER; note = 2' fluoro-modified nucleoside with phosphorothioate linkage
  modified_base 3: mod_base = OTHER; note = 2' O-methyl nucleoside
  modified_base 4: mod_base = OTHER; note = 2' O-methyl nucleoside
  modified_base 5: mod_base = OTHER; note = 2' fluoro-modified nucleoside
  modified_base 6: mod_base = OTHER; note = 2' O-methyl nucleoside
  modified_base 7: mod_base = OTHER; note = 2' fluoro-modified nucleoside
  modified_base 8: mod_base = OTHER; note = 2' O-methyl nucleoside
  modified_base 9: mod_base = OTHER; note = 2' O-methyl nucleoside
  modified_base 10: mod_base = OTHER; note = 2' fluoro-modified nucleoside
  modified_base 11: mod_base = OTHER; note = 2' O-methyl nucleoside
  modified_base 12: mod_base = OTHER; note = 2' O-methyl nucleoside
  modified_base 13: mod_base = OTHER; note = 2' O-methyl nucleoside
  modified_base 14: mod_base = OTHER; note = 2' fluoro-modified nucleoside
  modified_base 15: mod_base = OTHER; note = 2' O-methyl nucleoside
  modified_base 16: mod_base = OTHER; note = 2' fluoro-modified nucleoside
  modified_base 17: mod_base = OTHER; note = 2' O-methyl nucleoside
  modified_base 18: mod_base = OTHER; note = 2' fluoro-modified nucleoside
  modified_base 19: mod_base = OTHER; note = 2' O-methyl nucleoside with phosphorothioate linkage
  modified_base 20: mod_base = OTHER; note = 2' O-methyl nucleoside with phosphorothioate linkage
  modified_base 21: mod_base = OTHER; note = 2' O-methyl nucleoside
taccaactcatgatgtctgtt

SEQ ID NO: 4010 - RNA, 21 nt, synthetic construct
  source 1..21: mol_type = other RNA
  modified_base 1: mod_base = OTHER; note = 2' O-methyl nucleoside with phosphorothioate linkage
  modified_base 2: mod_base = OTHER; note = 2' fluoro-modified nucleoside with phosphorothioate linkage
  modified_base 3: mod_base = OTHER; note = 2' O-methyl nucleoside
  modified_base 4: mod_base = OTHER; note = 2' O-methyl nucleoside
  modified_base 5: mod_base = OTHER; note = 2' fluoro-modified nucleoside
  modified_base 6: mod_base = OTHER; note = 2' O-methyl nucleoside
  modified_base 7: mod_base = OTHER; note = 2' fluoro-modified nucleoside
  modified_base 8: mod_base = OTHER; note = 2' O-methyl nucleoside
  modified_base 9: mod_base = OTHER; note = 2' O-methyl nucleoside
  modified_base 10: mod_base = OTHER; note = 2' fluoro-modified nucleoside
  modified_base 11: mod_base = OTHER; note = 2' O-methyl nucleoside
  modified_base 12: mod_base = OTHER; note = 2' fluoro-modified nucleoside
  modified_base 13: mod_base = OTHER; note = 2' O-methyl nucleoside
  modified_base 14: mod_base = OTHER; note = 2' fluoro-modified nucleoside
  modified_base 15: mod_base = OTHER; note = 2' O-methyl nucleoside
  modified_base 16: mod_base = OTHER; note = 2' fluoro-modified nucleoside
  modified_base 17: mod_base = OTHER; note = 2' O-methyl nucleoside
  modified_base 18: mod_base = OTHER; note = 2' fluoro-modified nucleoside
  modified_base 19: mod_base = OTHER; note = 2' O-methyl nucleoside with phosphorothioate linkage
  modified_base 20: mod_base = OTHER; note = 2' O-methyl nucleoside with phosphorothioate linkage
  modified_base 21: mod_base = OTHER; note = 2' O-methyl nucleoside
ttgaatcttctcatttccctt

SEQ ID NO: 4011 - RNA, 19 nt, synthetic construct
  source 1..19: mol_type = other RNA
  modified_base 1: mod_base = OTHER; note = 2' O-methyl nucleoside with phosphorothioate linkage
  modified_base 2: mod_base = OTHER; note = 2' fluoro-modified nucleoside with phosphorothioate linkage
  modified_base 3: mod_base = OTHER; note = 2' O-methyl nucleoside
  modified_base 4: mod_base = OTHER; note = 2' fluoro-modified nucleoside
  modified_base 5: mod_base = OTHER; note = 2' O-methyl nucleoside
  modified_base 6: mod_base = OTHER; note = 2' O-methyl nucleoside
  modified_base 7: mod_base = OTHER; note = 2' fluoro-modified nucleoside
  modified_base 8: mod_base = OTHER; note = 2' O-methyl nucleoside
  modified_base 9: mod_base = OTHER; note = 2' O-methyl nucleoside
  modified_base 10: mod_base = OTHER; note = 2' O-methyl nucleoside
  modified_base 11: mod_base = OTHER; note = 2' O-methyl nucleoside
  modified_base 12: mod_base = OTHER; note = 2' fluoro-modified nucleoside
  modified_base 13: mod_base = OTHER; note = 2' O-methyl nucleoside
  modified_base 14: mod_base = OTHER; note = 2' fluoro-modified nucleoside
  modified_base 15: mod_base = OTHER; note = 2' O-methyl nucleoside
  modified_base 16: mod_base = OTHER; note = 2' fluoro-modified nucleoside
  modified_base 17: mod_base = OTHER; note = 2' O-methyl nucleoside
  modified_base 18: mod_base = OTHER; note = 2' fluoro-modified nucleoside with phosphorothioate linkage
  modified_base 19: mod_base = OTHER; note = 2' O-methyl nucleoside
tgatgtgaaaaacttgtca

SEQ ID NO: 4012 - RNA, 19 nt, synthetic construct
  source 1..19: mol_type = other RNA
  modified_base 1: mod_base = OTHER; note = 2' O-methyl nucleoside with phosphorothioate linkage
  modified_base 2: mod_base = OTHER; note = 2' fluoro-modified nucleoside with phosphorothioate linkage
  modified_base 3: mod_base = OTHER; note = 2' O-methyl nucleoside
  modified_base 4: mod_base = OTHER; note = 2' fluoro-modified nucleoside
  modified_base 5: mod_base = OTHER; note = 2' O-methyl nucleoside
  modified_base 6: mod_base = OTHER; note = 2' O-methyl nucleoside
  modified_base 7: mod_base = OTHER; note = 2' fluoro-modified nucleoside
  modified_base 8: mod_base = OTHER; note = 2' O-methyl nucleoside
  modified_base 9: mod_base = OTHER; note = 2' O-methyl nucleoside
  modified_base 10: mod_base = OTHER; note = 2' O-methyl nucleoside
  modified_base 11: mod_base = OTHER; note = 2' O-methyl nucleoside
  modified_base 12: mod_base = OTHER; note = 2' fluoro-modified nucleoside
  modified_base 13: mod_base = OTHER; note = 2' O-methyl nucleoside
  modified_base 14: mod_base = OTHER; note = 2' fluoro-modified nucleoside
  modified_base 15: mod_base = OTHER; note = 2' O-methyl nucleoside
  modified_base 16: mod_base = OTHER; note = 2' fluoro-modified nucleoside
  modified_base 17: mod_base = OTHER; note = 2' O-methyl nucleoside with phosphorothioate linkage
  modified_base 18: mod_base = OTHER; note = 2' fluoro-modified nucleoside with phosphorothioate linkage
  modified_base 19: mod_base = OTHER; note = 2' O-methyl nucleoside
tgatgtgaaaaacttgtca

SEQ ID NO: 4013 - RNA, 19 nt, synthetic construct
  source 1..19: mol_type = other RNA
  modified_base 1: mod_base = OTHER; note = 2' O-methyl nucleoside with phosphorothioate linkage
  modified_base 2: mod_base = OTHER; note = 2' fluoro-modified nucleoside with phosphorothioate linkage
  modified_base 3: mod_base = OTHER; note = 2' O-methyl nucleoside
  modified_base 4: mod_base = OTHER; note = 2' fluoro-modified nucleoside
  modified_base 5: mod_base = OTHER; note = 2' O-methyl nucleoside
  modified_base 6: mod_base = OTHER; note = 2' O-methyl nucleoside
  modified_base 7: mod_base = OTHER; note = 2' fluoro-modified nucleoside
  modified_base 8: mod_base = OTHER; note = 2' O-methyl nucleoside
  modified_base 9: mod_base = OTHER; note = 2' O-methyl nucleoside
  modified_base 10: mod_base = OTHER; note = 2' O-methyl nucleoside
  modified_base 11: mod_base = OTHER; note = 2' O-methyl nucleoside
  modified_base 12: mod_base = OTHER; note = 2' fluoro-modified nucleoside
  modified_base 13: mod_base = OTHER; note = 2' O-methyl nucleoside
  modified_base 14: mod_base = OTHER; note = 2' fluoro-modified nucleoside
  modified_base 15: mod_base = OTHER; note = 2' O-methyl nucleoside
  modified_base 16: mod_base = OTHER; note = 2' fluoro-modified nucleoside
  modified_base 17: mod_base = OTHER; note = 2' O-methyl nucleoside with phosphorothioate linkage
  modified_base 18: mod_base = OTHER; note = 2' O-methyl nucleoside with phosphorothioate linkage
  modified_base 19: mod_base = OTHER; note = 2' O-methyl nucleoside
tgatgtgaaaaacttgtca

SEQ ID NO: 4014 - RNA, 18 nt, synthetic construct
  source 1..18: mol_type = other RNA
  modified_base 1: mod_base = OTHER; note = 2' O-methyl nucleoside with phosphorothioate linkage
  modified_base 2: mod_base = OTHER; note = 2' fluoro-modified nucleoside with phosphorothioate linkage
  modified_base 3: mod_base = OTHER; note = 2' O-methyl nucleoside
  modified_base 4: mod_base = OTHER; note = 2' fluoro-modified nucleoside
  modified_base 5: mod_base = OTHER; note = 2' O-methyl nucleoside
  modified_base 6: mod_base = OTHER; note = 2' O-methyl nucleoside
  modified_base 7: mod_base = OTHER; note = 2' fluoro-modified nucleoside
  modified_base 8: mod_base = OTHER; note = 2' O-methyl nucleoside
  modified_base 9: mod_base = OTHER; note = 2' O-methyl nucleoside
  modified_base 10: mod_base = OTHER; note = 2' O-methyl nucleoside
  modified_base 11: mod_base = OTHER; note = 2' O-methyl nucleoside
  modified_base 12: mod_base = OTHER; note = 2' fluoro-modified nucleoside
  modified_base 13: mod_base = OTHER; note = 2' O-methyl nucleoside
  modified_base 14: mod_base = OTHER; note = 2' fluoro-modified nucleoside
  modified_base 15: mod_base = OTHER; note = 2' O-methyl nucleoside
  modified_base 16: mod_base = OTHER; note = 2' fluoro-modified nucleoside with phosphorothioate linkage
  modified_base 17: mod_base = OTHER; note = 2' O-methyl nucleoside with phosphorothioate linkage
  modified_base 18: mod_base = OTHER; note = 2' O-methyl nucleoside
tgatgtgaaaaacttgtc

SEQ ID NO: 4015 - RNA, 19 nt, synthetic construct
  source 1..19: mol_type = other RNA
  modified_base 1: mod_base = OTHER; note = 2' O-methyl nucleoside with phosphorothioate linkage
  modified_base 2: mod_base = OTHER; note = 2' fluoro-modified nucleoside with phosphorothioate linkage
  modified_base 3: mod_base = OTHER; note = 2' O-methyl nucleoside
  modified_base 4: mod_base = OTHER; note = 2' fluoro-modified nucleoside
  modified_base 5: mod_base = OTHER; note = 2' O-methyl nucleoside
  modified_base 6: mod_base = OTHER; note = 2' O-methyl nucleoside
  modified_base 7: mod_base = OTHER; note = 2' fluoro-modified nucleoside
  modified_base 8: mod_base = OTHER; note = 2' O-methyl nucleoside
  modified_base 9: mod_base = OTHER; note = 2' O-methyl nucleoside
  modified_base 10: mod_base = OTHER; note = 2' fluoro-modified nucleoside
  modified_base 11: mod_base = OTHER; note = 2' O-methyl nucleoside
  modified_base 12: mod_base = OTHER; note = 2' fluoro-modified nucleoside
  modified_base 13: mod_base = OTHER; note = 2' O-methyl nucleoside
  modified_base 14: mod_base = OTHER; note = 2' fluoro-modified nucleoside
  modified_base 15: mod_base = OTHER; note = 2' O-methyl nucleoside
  modified_base 16: mod_base = OTHER; note = 2' fluoro-modified nucleoside
  modified_base 17: mod_base = OTHER; note = 2' O-methyl nucleoside
  modified_base 18: mod_base = OTHER; note = 2' fluoro-modified nucleoside with phosphorothioate linkage
  modified_base 19: mod_base = OTHER; note = 2' O-methyl nucleoside
tactaccgaatctttcatc

SEQ ID NO: 4016 - RNA, 19 nt, synthetic construct
  source 1..19: mol_type = other RNA
  modified_base 1: mod_base = OTHER; note = 2' O-methyl nucleoside with phosphorothioate linkage
  modified_base 2: mod_base = OTHER; note = 2' fluoro-modified nucleoside with phosphorothioate linkage
  modified_base 3: mod_base = OTHER; note = 2' O-methyl nucleoside
  modified_base 4: mod_base = OTHER; note = 2' fluoro-modified nucleoside
  modified_base 5: mod_base = OTHER; note = 2' O-methyl nucleoside
  modified_base 6: mod_base = OTHER; note = 2' O-methyl nucleoside
  modified_base 7: mod_base = OTHER; note = 2' fluoro-modified nucleoside
  modified_base 8: mod_base = OTHER; note = 2' O-methyl nucleoside
  modified_base 9: mod_base = OTHER; note = 2' O-methyl nucleoside
  modified_base 10: mod_base = OTHER; note = 2' fluoro-modified nucleoside
  modified_base 11: mod_base = OTHER; note = 2' O-methyl nucleoside
  modified_base 12: mod_base = OTHER; note = 2' fluoro-modified nucleoside
  modified_base 13: mod_base = OTHER; note = 2' O-methyl nucleoside
  modified_base 14: mod_base = OTHER; note = 2' fluoro-modified nucleoside
  modified_base 15: mod_base = OTHER; note = 2' O-methyl nucleoside
  modified_base 16: mod_base = OTHER; note = 2' fluoro-modified nucleoside
  modified_base 17: mod_base = OTHER; note = 2' O-methyl nucleoside with phosphorothioate linkage
  modified_base 18: mod_base = OTHER; note = 2' O-methyl nucleoside with phosphorothioate linkage
  modified_base 19: mod_base = OTHER; note = 2' O-methyl nucleoside
tactaccgaatctttcatc

SEQ ID NO: 4017 - RNA, 18 nt, synthetic construct
  source 1..18: mol_type = other RNA
  modified_base 1: mod_base = OTHER; note = 2' O-methyl nucleoside with phosphorothioate linkage
  modified_base 2: mod_base = OTHER; note = 2' fluoro-modified nucleoside with phosphorothioate linkage
  modified_base 3: mod_base = OTHER; note = 2' O-methyl nucleoside
  modified_base 4: mod_base = OTHER; note = 2' fluoro-modified nucleoside
  modified_base 5: mod_base = OTHER; note = 2' O-methyl nucleoside
  modified_base 6: mod_base = OTHER; note = 2' O-methyl nucleoside
  modified_base 7: mod_base = OTHER; note = 2' fluoro-modified nucleoside
  modified_base 8: mod_base = OTHER; note = 2' O-methyl nucleoside
  modified_base 9: mod_base = OTHER; note = 2' O-methyl nucleoside
  modified_base 10: mod_base = OTHER; note = 2' fluoro-modified nucleoside
  modified_base 11: mod_base = OTHER; note = 2' O-methyl nucleoside
  modified_base 12: mod_base = OTHER; note = 2' fluoro-modified nucleoside
  modified_base 13: mod_base = OTHER; note = 2' O-methyl nucleoside
  modified_base 14: mod_base = OTHER; note = 2' fluoro-modified nucleoside
  modified_base 15: mod_base = OTHER; note = 2' O-methyl nucleoside
  modified_base 16: mod_base = OTHER; note = 2' fluoro-modified nucleoside with phosphorothioate linkage
  modified_base 17: mod_base = OTHER; note = 2' O-methyl nucleoside with phosphorothioate linkage
  modified_base 18: mod_base = OTHER; note = 2' O-methyl nucleoside
tactaccgaatctttcat

SEQ ID NO: 4018 - RNA, 20 nt, synthetic construct
  source 1..20: mol_type = other RNA
  misc_feature 1: note = ETL17 moiety with a phosphorothioate linkage
  modified_base 1: mod_base = OTHER; note = 2' O-methyl nucleoside
  modified_base 2: mod_base = OTHER; note = 2' O-methyl nucleoside
  modified_base 3: mod_base = OTHER; note = 2' O-methyl nucleoside
  modified_base 4: mod_base = OTHER; note = 2' O-methyl nucleoside
  modified_base 5: mod_base = OTHER; note = 2' O-methyl nucleoside
  modified_base 6: mod_base = OTHER; note = 2' O-methyl nucleoside
  modified_base 7: mod_base = OTHER; note = 2' fluoro-modified nucleoside
  modified_base 8: mod_base = OTHER; note = 2' fluoro-modified nucleoside
  modified_base 9: mod_base = OTHER; note = 2' fluoro-modified nucleoside
  modified_base 10: mod_base = OTHER; note = 2' fluoro-modified nucleoside
  modified_base 11: mod_base = OTHER; note = 2' O-methyl nucleoside
  modified_base 12: mod_base = OTHER; note = 2' O-methyl nucleoside
  modified_base 13: mod_base = OTHER; note = 2' O-methyl nucleoside
  modified_base 14: mod_base = OTHER; note = 2' O-methyl nucleoside
  modified_base 15: mod_base = OTHER; note = 2' O-methyl nucleoside
  modified_base 16: mod_base = OTHER; note = 2' O-methyl nucleoside
  modified_base 17: mod_base = OTHER; note = 2' O-methyl nucleoside
  modified_base 18: mod_base = OTHER; note = 2' O-methyl nucleoside with phosphorothioate linkage
  modified_base 19: mod_base = OTHER; note = 2' O-methyl nucleoside with phosphorothioate linkage
  modified_base 20: mod_base = OTHER; note = 2' O-methyl nucleoside
gacaagtttttcacatcatt

SEQ ID NO: 4019 - RNA, 20 nt, synthetic construct
  source 1..20: mol_type = other RNA
  misc_feature 1: note = ETL17 moiety with a phosphorothioate linkage
  modified_base 1: mod_base = OTHER; note = 2' O-methyl nucleoside
  modified_base 2: mod_base = OTHER; note = 2' O-methyl nucleoside
  modified_base 3: mod_base = OTHER; note = 2' methoxy ethyl nucleoside
  modified_base 4: mod_base = OTHER; note = 2' O-methyl nucleoside
  modified_base 5: mod_base = OTHER; note = 2' fluoro-modified nucleoside
  modified_base 6: mod_base = OTHER; note = 2' fluoro-modified nucleoside
  modified_base 7: mod_base = OTHER; note = 2' fluoro-modified nucleoside
  modified_base 8: mod_base = OTHER; note = 2' fluoro-modified nucleoside
  modified_base 9: mod_base = OTHER; note = 2' O-methyl nucleoside
  modified_base 10: mod_base = OTHER; note = 2' O-methyl nucleoside
  modified_base 11: mod_base = OTHER; note = 2' O-methyl nucleoside
  modified_base 12: mod_base = OTHER; note = 2' methoxy ethyl nucleoside
  modified_base 13: mod_base = OTHER; note = 2' O-methyl nucleoside
  modified_base 14: mod_base = OTHER; note = 2' O-methyl nucleoside
  modified_base 15: mod_base = OTHER; note = 2' O-methyl nucleoside
  modified_base 16: mod_base = OTHER; note = 2' O-methyl nucleoside
  modified_base 17: mod_base = OTHER; note = 2' O-methyl nucleoside
  modified_base 18: mod_base = OTHER; note = 2' O-methyl nucleoside with phosphorothioate linkage
  modified_base 19: mod_base = OTHER; note = 2' O-methyl nucleoside with phosphorothioate linkage
  modified_base 20: mod_base = OTHER; note = 2' O-methyl nucleoside
atgaaagattcggtagtatt

SEQ ID NO: 4020 - RNA, 20 nt, synthetic construct
  source 1..20: mol_type = other RNA
gacaagtttttcacatcatt

SEQ ID NO: 4021 - RNA, 20 nt, synthetic construct
  source 1..20: mol_type = other RNA
atgaaagattcggtagtatt

SEQ ID NO: 4022 - RNA, 18 nt, synthetic construct
  source 1..18: mol_type = other RNA
tgatgtgaaaaacttgtc

SEQ ID NO: 4023 - RNA, 18 nt, synthetic construct
  source 1..18: mol_type = other RNA
tactaccgaatctttcat